(19) United States
(12) Patent Application Publication
(10) Pub. No.: US 2002/0155571 A1
(43) Pub. Date: Oct. 24, 2002

(54) Triazine degrading enzymes

(76) Inventors: Sun Ai Raillard, Mountain View, CA (US); Jeremy Minshull, Minshull, CA (US); Claes Gustafsson, Belmont, CA (US)

Correspondence Address: LAW OFFICES OF JONATHAN ALAN QUINE, P O BOX 458, ALAMEDA, CA, 94501

(21) Appl. No.: 09/796,990

(22) Filed: Feb. 28, 2001

Related U.S. Application Data
(60) Provisional application No. 60/185,809, filed on Feb. 29, 2000.

(51) Int. Cl. C12P 17/10; C12N 9/16; C07H 21/04; C12P 21/02; C12N 5/06

(52) U.S. Cl. 435/196; 435/320.1; 435/69.1; 435/325; 536/23.2; 435/121

(57) ABSTRACT

New triazine hydrolases, (both nucleic acids and proteins) are provided. Compositions which include these new proteins and/or genes, recombinant cells, shuffling methods involving the new triazine hydrolases, antibodies to the new triazine hydrolases and methods of using the triazine hydrolases are also provided.

### CROSS-REFERENCE TO RELATED APPLICATIONS

[0001] Pursuant to 35 U.S.C. § 119(e) and any other applicable statute or rule, the present application claims benefit of and priority to U.S. Ser. No. 60/185,809 “Triazine Degrading Enzymes,” by Bermudez et al., filed Feb. 29, 2000, and co-filed PCT application, “Triazine Degrading Enzymes,” by Bermudez et al., filed Feb. 27, 2001, Attorney Docket No. 02-104510PC.

### COPYRIGHT NOTIFICATION

[0002] Pursuant to 37 C.F.R. 1.71(e), Applicants note that a portion of this disclosure contains material which is subject to copyright protection. The copyright owner has no objection to the facsimile reproduction by anyone of the patent document or patent disclosure, as it appears in the Patent and Trademark Office patent file or records, but otherwise reserves all copyright rights whatsoever.

### BACKGROUND OF THE INVENTION

[0003] Atrazine and other triazine derivatives are widely used as herbicides for broad leaf weed control. Approximately 800 million pounds of these compounds were used in the U.S. between 1980 and 1990. As a result of this widespread use, the compounds have been detected in ground and surface water in the U.S. and in many other countries that use triazine derivatives.

[0004] Atrazine and related compounds are degraded very slowly in nature. For example, atrazine has a water solubility of 33 mg/liter at 27° C. and its half-life can vary from about 4 to about 60 weeks when present in soil. Therefore, high concentrations of triazine derivatives in soil can take quite a long time to dissipate.

[0005] Isolation of triazine and/or atrazine degrading microorganisms has been reported by numerous sources. See, e.g., Behki et al., J. Agric. Food Chem. 34, 746-749 (1986); Behki et al., Appl. Environ. Microbiol. 59, 1955-1959 (1993); Cook, FEMS Microbiol. Rev. 46, 93-116 (1987); Cook et al., J. Agric. Food Chem. 29, 1135-1143 (1981); Erikson et al., Critical Rev. Environ. Cont. 19, 1-13 (1989); Giardina et al., Agric. Biol. Chem. 44, 2067-2072 (1980); Jesse et al;, Appl. Environ. Microbiol. 45 97-102 (1983); Mandelbaum et al., Appl. Environ. Microbiol. 61, 1451-1457 (1995); Mandelbaum et al., Appl. Environ. Microbiol. 59, 1696-1701 (1993); Mandelbaum et al., Environ. Sci. Technol. 27, 1943-1946 (1993); Radosevich et al., Appl. Environ. Microbiol. 61, 297-302 (1995); and Yanze-Kontchou et al., Appl. Environ. Microbiol. 60 4297-4302 (1994).

[0006] Genes encoding atrazine degrading enzymes, e.g., atrazine chlorohydrolases, have also been isolated. See, e.g., Souza et al., Appl. Environ. Microbiol. 61, 3373-3378 (1995). While this protein is useful for dechlorinating atrazine, improved triazine hydrolases are desirable.

[0007] The present invention provides novel triazine hydrolases that provide novel enzyme substrate activity. These hydrolases are useful in a variety of soil and water treatments and other industrial and commercial applications that will be apparent upon further review.

### SUMMARY OF THE INVENTION

[0008] The present invention provides novel triazine hydrolases with improved characteristics such as activity against a wider range of substrates than wild type triazine hydrolases. In one aspect, the invention provides isolated and recombinant nucleic acids corresponding to polynucleotides that are novel triazine hydrolases, encode novel triazine hydrolase proteins, hybridize under highly stringent conditions to such novel triazine hydrolases or polynucleotides encoding novel triazine hydrolase proteins, or fragments thereof encoding polypeptides with triazine hydrolase activity.

[0009] In one embodiment, the invention provides polynucleotides which include a subsequence corresponding to one or more of SEQ ID NO: 1 to SEQ ID NO: 48 or a complementary polynucleotide sequence thereof. Polynucleotide sequences encoding a polypeptide selected from SEQ ID NO: 49 to SEQ ID NO: 608, or a complementary polynucleotide sequence thereof are also provided. Polynucleotide sequences which hybridize under highly stringent conditions over substantially the entire length of one or more of the above polynucleotide sequences provide additional embodiments. Other embodiments include fragments of the above sequences, which fragments typically have triazine hydrolase activity.

[0010] In preferred embodiments, the nucleic acids of the invention comprise a polynucleotide that encodes a hydrolase, e.g., a triazine hydrolase. The triazine hydrolase typically hydrolyzes one or more of: aminoatrazine, atrazine, triazine, atratone, N-methylatrazine, ametryn, aminopropazine, propazine, prometon, N-methylpropazine, prometryn, aminomorphazine, morphazine, morphatryn, morphaton, or N-methylmorphazine. The encoded polypeptide is typically about 450 to about 500 amino acids in length or about 474 amino acids in length. Polypeptides comprising at least about 20 contiguous amino acids, at least about 50 contiguous amino acids, at least about 100 contiguous amino acids, or at least 150 contiguous amino acids of any one of SEQ ID NO: 49-608 are also provided.

[0011] In another aspect, the invention provides a cell comprising any of the nucleic acids described above. Such cells typically express a polypeptide encoded by one of the nucleic acids of the invention.

[0012] In another aspect, vectors comprising the nucleic acids of the invention are provided. The vector, e.g., an expression vector, typically comprises a plasmid, a cosmid, a phage, a virus, or the like. Cells transduced by such vectors are also provided.

[0013] In another aspect, the invention provides remediation compositions comprising a cell comprising the polypeptides or polynucleotides of the invention. The remediation compositions are typically used to treat or decontaminate triazine or atrazine contaminated water, soil, or the like. Such remediation compositions are optionally used in the methods of the invention. For example, a method of treating a sample comprising atrazine or a triazine derivative is provided. The method comprises adding a composition to a sample comprising atrazine or a triazine derivative, wherein the composition comprises a polypeptide encoded by a nucleic acid of the invention. The nucleic acids and polypeptides of the invention are thus used to decontaminate triazine contaminated soil, water, or the like.

[0014] Compositions containing two or more nucleic acids of the invention are an additional feature of the invention. In some cases, these compositions are libraries of nucleic acids, preferably containing at least ten such nucleic acids. Compositions produced by digesting one or more nucleic acids of the invention, e.g., with a restriction endonuclease, an RNAse, or a DNAse, are also a feature of the invention, as are compositions produced by incubating one or more nucleic acids of the invention, e.g., in the presence of deoxyribonucleotide triphosphates and a nucleic acid polymerase, such as a thermostable polymerase.

[0015] Isolated or recombinant polypeptides encoded by the nucleic acids of the invention are also provided. For example, polypeptides comprising a sequence selected from SEQ ID NO: 49-608 are provided. These polypeptides typically have triazine hydrolase activity of at least 50,000 nM per hour or about 2-fold to at least about 200-fold greater than an atrazine chlorohydrolase corresponding to U55933. Polypeptides comprising about 100 contiguous amino acids, at least about 150 contiguous amino acids of the encoded protein, or at least about 250 contiguous amino acids of the encoded protein are also provided.

[0016] Furthermore, polypeptides of the invention with secretion/localization sequences are a feature of the invention, as are polypeptides with purification subsequences, including epitope tags, FLAG tags, polyhistidine tags, GST fusions, and the like. Similarly, polypeptides of the invention bearing a methionine at the N-terminus or comprising one or more modified amino acid, e.g., a glycosylated amino acid, a PEGylated amino acid, a farnesylated amino acid, an acetylated amino acid, a biotinylated amino acid, or the like, are features of the invention.

[0017] Polypeptides that are specifically bound by a polyclonal antisera raised against one or more antigen derived from SEQ ID NO: 49-608, or a fragment thereof, wherein the antisera is subtracted with a naturally occurring hydrolase polypeptide corresponding to U55933 or a triazine hydrolase homologue nucleic acid that is present in a public database such as GenBank™ at the time of filing of the subject application as well as antibodies or antisera produced by administering such polypeptides to a mammal and antibodies or antisera that specifically bind a polypeptide of the invention and do not specifically bind to naturally-occurring or recombinant hydrolase polypeptides corresponding to U55933 are all features of the invention.

[0018] In another aspect, the invention provides methods of producing polypeptides. The methods typically comprise introducing into a population of cells a nucleic acid or recombinant expression vector of the invention. The nucleic acid is generally operatively linked to a regulatory sequence effective to produce the encoded polypeptide. The cells are cultured in a culture medium to produce the polypeptide, which is isolated from the cells or from the culture medium.

[0019] Another aspect of the invention relates to DNA shuffling to provide novel triazine hydrolase homologues by recursively recombining one or more nucleic acid of the invention with one or more additional nucleic acid, such as a nucleic acid encoding a triazine hydrolase homologue or subsequence thereof. In one embodiment, recursive recombination produces at least one library of recombinant triazine hydrolase homologue nucleic acids. The libraries so produced are embodiments of the invention as are cells comprising the libraries. Furthermore, methods of producing modified triazine hydrolases by mutating the nucleic acids of the invention are provided. Recombinant and mutant triazine hydrolase nucleic acids produced by the methods of the invention are also embodiments of the invention.

[0020] In addition, nucleic acids comprising unique subsequences selected from SEQ ID NO: 1 to SEQ ID NO: 48, (as compared to a nucleic acid corresponding to U55933); polypeptides comprising a unique subsequence from: SEQ ID NO: 49-608, (as compared to a polypeptide corresponding to U55933); and target nucleic acids that hybridize under stringent conditions to a unique coding oligonucleotide that encodes a unique subsequence of a polypeptide selected from: SEQ ID NO: 49-608, (unique as compared to a polypeptide corresponding to U55933) are also features of the invention.

[0021] The invention also provides computers, computer readable mediums and integrated systems, including databases that are composed of sequence records including character strings corresponding to SEQ ID NO: 1 to SEQ ID NO: 608. Such integrated systems optionally include one or more instruction set for selecting, aligning, translating, reverse-translating, or viewing any of the above character strings with each other and/or with any additional nucleic acid or amino acid sequence.

### BRIEF DESCRIPTION OF THE FIGURES

[0022] FIG. 1 illustrates the conversion of atrazine to hydroxyatrazine via dechlorination catalyzed by atrazine chlorohydrolase.

[0023] FIG. 2 defines and illustrates a variety of triazine derivatives designed to explore chemical space. One side chain is fixed as isopropyl amine and the second side chain (R1) and the leaving group (R2) are varied, e.g., to confer increased bulkiness.

[0024] FIG. 3 provides turnover rates in nM substrate/h/20 μl cells (A600=3.0) for atrazine chlorohydralase and a preferred library member with activity towards each of ten substrates with either ethyl or isopropyl amine R1 groups.

[0025] FIG. 4 provides a distribution of functional activity in sequence space. Triazine hydrolase activities towards each of 15 substrates is indicated by a circle whose area is proportional to the activity. Substrates are arranged in a grid format as in FIG. 2. Activities are shown on a phylogenetic tree to show relationships between enzyme sequences.

### DETAILED DISCUSSION OF THE INVENTION

[0026] Atrazine and other triazine derivatives are widely used in herbicides, either alone or in combination with other compounds, e.g., for control of broad-leaf weeds. Atrazine and triazine runoff and persistence in soil and water often lead to triazine levels exceeding EPA limits for drinking water. Solutions to these concerns, e.g., atrazine contaminated soil, involve introduction of indigenous and/or recombinant bacteria to metabolize or degrade triazine compounds in soil or water. Wild-type hydrolases present in indigenous bacteria degrade atrazine at low levels but do not degrade or metabolize other triazine derivatives. FIG. 1 illustrates the conversion of atrazine to hydroxyatrazine using atrazine chlorohydrolase.

[0027] The present invention provides novel triazine hydrolases with triazine degradation activity, e.g., hydrolysis of atrazine as well as degradation activity with respect to other triazine derivatives that are not metabolized by wild type hydrolases. Triazine hydrolase refers to an enzyme or polypeptide having triazine hydrolase activity, i.e., the ability to hydrolyze or otherwise degrade one or more species of the class of compounds represented by:

[chemical structure]

[0028] wherein R₁ and R₃ each independently comprise an amino group, i.e., —NH₂, or a substituted linear, branched, or cyclic amino group. Typically R₁ and R₃ are each independently a lower-alkyl-substituted amino group or a morpholino group. As used herein, the term “lower alkyl” refers to a C₁₋₆ alkyl. More typically, R₁ and R₃ are each independently —NH(C₂H₅), —NHCH(CH₃)₂,

[chemical structure]

[0029] or the like. Preferably, R₃ is —NHCH(CH₃)₂, R₂ is an amino group, i.e., —NH₂, or an optionally substituted amino group, e.g., —NRH or —NRR′, a halo, a lower alkoxy, or —S—R, where R and R′ are each independently a lower alkyl group. Typically R₂ is —NH₂, —X, wherein X is a halogen such as Cl, —OCH₃, —NH(CH₃), or —S—CH₃. Example compounds are shown and defined by FIG. 2, which defines the R groups for a variety of triazine compounds.

[0030] Definitions

[0031] A “polynucleotide sequence” is a nucleic acid (which is a polymer of nucleotides (A,C,T,U,G, etc. or naturally occurring or artificial nucleotide analogues) or a character string representing a nucleic acid, depending on context. Either the given nucleic acid or the complementary nucleic acid can be determined from any specified polynucleotide sequence.

[0032] Similarly, an “amino acid sequence” is a polymer of amino acids (a protein, polypeptide, etc.) or a character string representing an amino acid polymer, depending on context. Either the given nucleic acid or the complementary nucleic acid can be determined from any specified polynucleotide sequence.

[0033] A nucleic acid, protein or other component is “isolated” when it is partially or completely separated from components with which it is normally associated (other proteins, nucleic acids, cells, synthetic reagents, etc.). A nucleic acid or polypeptide is “recombinant” when it is artificial or engineered, or derived from an artificial or engineered protein or nucleic acid.

[0034] A “subsequence” or “fragment” is any portion of an entire sequence, up to and including the complete sequence.

[0035] Numbering of a given amino acid or nucleotide polymer “corresponds to numbering” of a selected amino acid polymer or nucleic acid when the position of any given polymer component (amino acid residue, incorporated nucleotide, etc.) is designated by reference to the same residue position in the selected amino acid or nucleotide, rather than by the actual position of the component in the given polymer.

[0036] A vector is a composition for facilitating cell transduction by a selected nucleic acid, or expression of the nucleic acid in the cell. Vectors include, e.g., plasmids, cosmids, viruses, YACs, bacteria, poly-lysine, etc.

[0037] “Substantially an entire length of a polynucleotide or amino acid sequence” refers to at least about 70%, generally at least about 80%, or typically about 90% or more of a sequence.

[0038] As used herein, an “antibody” refers to a protein comprising one or more polypeptides substantially or partially encoded by immunoglobulin genes or fragments of immunoglobulin genes. The recognized immunoglobulin genes include the kappa, lambda, alpha, gamma, delta, epsilon and mu constant region genes, as well as myriad immunoglobulin variable region genes. Light chains are classified as either kappa or lambda. Heavy chains are classified as gamma, mu, alpha, delta, or epsilon, which in turn define the immunoglobulin classes, IgG, IgM, IgA, IgD and IgE, respectively. A typical immunoglobulin (antibody) structural unit comprises a tetramer. Each tetramer is composed of two identical pairs of polypeptide chains, each pair having one “light” (about 25 kD) and one “heavy” chain (about 50-70 kD). The N-terminus of each chain defines a variable region of about 100 to 110 or more amino acids primarily responsible for antigen recognition. The terms variable light chain (VL) and variable heavy chain (VH) refer to these light and heavy chains respectively. Antibodies exist as intact immunoglobulins or as a number of well characterized fragments produced by digestion with various peptidases. Thus, for example, pepsin digests an antibody below the disulfide linkages in the hinge region to produce F(ab)′2, a dimer of Fab which itself is a light chain joined to VH-CH1 by a disulfide bond. The F(ab)′2 may be reduced under mild conditions to break the disulfide linkage in the hinge region thereby converting the (Fab′)2 dimer into an Fab′ monomer. The Fab′ monomer is essentially an Fab with part of the hinge region (see, Fundamental Immunology, W. E. Paul, ed., Raven Press, N.Y. Fourth Edition (1998), for a more detailed description of other antibody fragments). While various antibody fragments are defined in terms of the digestion of an intact antibody, one of skill will appreciate that such Fab′ fragments may be synthesized de novo either chemically or by utilizing recombinant DNA methodology. Thus, the term antibody, as used herein also includes antibody fragments either produced by the modification of whole antibodies or synthesized de novo using recombinant DNA methodologies. Antibodies include single chain antibodies, including single chain Fv (sFv) antibodies in which a variable heavy and a variable light chain are joined together (directly or through a peptide linker) to form a continuous polypeptide.

[0039] A variety of additional terms are defined or otherwise characterized herein.

[0040] Polynucleotides

[0041] Triazine Hydrolase Sequences

[0042] The invention provides isolated or recombinant atrazine hydrolase polypeptides, and isolated or recombinant polynucleotides encoding the polypeptides. A small library of triazine hydrolases, i.e., about 1500 clones, were screened by high throughput mass spectrometry (See, e.g., High Throughput Mass Spectrometry, By Raillard et al., U.S. Ser. No. 09/499,525, filed Feb. 23, 2000 (Attorney Docket No. 02-029510US) for methods of performing high-throughput mass spectrometry) for activity against about 15 different triazine derivatives, covering a chemical structure space enabling investigation of leaving group chemistry as well as substrate bulkiness (See, e.g., FIG. 2).

[0043] The proteins of the present invention were screened for hydrolase activity against atrazine and other triazine derivatives as represented by

[chemical structure]

[0044] wherein the R groups are defined as described above and in FIG. 2. Examples of such triazine compounds include, but are not limited to aminotriazine, atrazine, atratone, N-methylatrazine, ametryn, aminopropazine, propazine, prometon, N-methylpropazine, prometryn, aminomorphazine, morphazine, morphatryn, morphaton, and N-methylmorphazine, which are all depicted and defined in FIG. 2. Clones were identified that showed about 2-fold to about 180 or 200-fold improvement over a wild type atrazine chlorohydrolase (as characterized at GenBank #U55933). In some embodiments, the hydrolases can display an improvement of about 500-fold or more. Clones with the ability to hydrolyze alternative substrates, i.e., other triazine derivatives, were also obtained. See, for example, Tables 3 and 4, which provide data regarding degradation of novel triazine substrates by the triazine hydrolases of the invention. Triazine hydrolases were screened for hydrolyzed product formation in the following reaction conditions: 20 μl of washed and induced cells (OD600=3) in a total volume of 100 μl 10 mM NH₃ Acetate at pH 6.8 with 250 μM substrate, i.e., triazine derivatives, at 22° C. or 37° C. Results are provided in Tables 3 and 4, provided herein.

[0045] Modified amino acid at positions 84 and 92 can affect the bulk of side chain R1 that can be accepted. For example, using site directed mutagenesis, a novel triazine hydrolase was created with an alanine at position 92 in combination with asparagine and serine at positions 328 and 331, respectively. This novel hydrolase showed enhanced dechlorination activity versus bulkier substrates.

[0046] FIG. 3 provides a turnover rate in nM substrate/h/20 μl cells (at A600=3.0) for preferred triazine hydrolase library members as compared to naturally occurring atrazine chlorohydrolase (atzA) for various substrates as indicated in the figure. Novel triazine hydrolases were found that that yielded a higher transformation rate, e.g., up to 150-fold greater, than native hydrolases. In addition, the novel triazine hydrolases provided herein also hydrolyzed at least five triazine compounds, e.g., prometon, prometryn, N-methylaminopropazine, morphazine, and aminomorphazine, that were not hydrolyzed by a native hydrolase.

[0047] FIG. 4 provides a distribution of functional activity ion sequence space. Triazine hydrolase activity toward each of the 15 substrates provided in FIG. 2 is indicated by a circle whose area is proportional to the activity. The 15 substrates are arranged in a grid that shows relationships between enzyme sequences.

[0048] Exemplary nucleic acids that encode polypeptides having improved or expanded triazine degradation properties, such as degradation activity with respect to a variety of triazine derivatives, are provided in SEQ ID NO: 1 to SEQ ID NO: 48 encoding the polypeptides provided in SEQ ID NO: 49 to SEQ ID NO: 96. Additional triazine degrading polypeptides are exemplified by SEQ ID NOs: 97-608, as shown in Table 5. The sequences listed in Table 5, e.g., SEQ ID NOs: 97-608, are based on the polypeptide sequence of atrazine hydrolase (atzA) (Genbank #U55933), with corresponding numbering. The atzA sequence is modified as shown by the table to provide new sequences. Modifications are indicated at the positions indicated by the column headings using single letter symbols for each amino acid. For example SEQ ID NO: 97 comprises a phenylalanine at position 84, a leucine at position 92, an aspartic acid residue at position number 125, an isoleucine at position number 217, a proline residue at position 219, an isoleucine at position number 253, a glycine at position 255, an aspartic acid at position 328, and a cysteine at position 331.

[0049] Making Polynucleotides

[0050] Polynucleotides and oligonucleotides of the invention can be prepared by standard solid-phase methods, according to known synthetic methods. Typically, fragments of up to about 100 bases are individually synthesized, then joined (e.g., by enzymatic or chemical ligation methods, or polymerase mediated recombination methods) to form essentially any desired continuous sequence. For example, the polynucleotides and oligonucleotides of the invention can be prepared by chemical synthesis using, e.g., the classical phosphoramidite method described by Beaucage et al., (1981) Tetrahedron Letters 22:1859-69, or the method described by Matthes et al., (1984) EMBO J. 3: 801-05., e.g., as is typically practiced in automated synthetic methods. According to the phosphoramidite method, oligonucleotides are synthesized, e.g., in an automatic DNA synthesizer, purified, annealed, ligated and cloned in appropriate vectors.

[0051] In addition, essentially any nucleic acid can be custom ordered from any of a variety of commercial sources, such as The Midland Certified Reagent Company (mcrc@oligos.com), The Great American Gene Company (http://www.genco.com), ExpressGen Inc. (www.expressgen.com), Operon Technologies Inc. (Alameda, Calif.) and many others. Similarly, peptides and antibodies can be custom ordered from any of a variety of sources, such as PeptidoGenic (pkim@ccnet.com), HTI Bio-products, inc. (http:/www.htibio.com), BMA Biomedicals Ltd (U.K.), Bio.Synthesis, Inc., and many others.

[0052] Certain polynucleotides of the invention may also obtained by screening cDNA libraries using oligonucleotide probes which can hybridize to or PCR-amplify polynucleotides which encode the triazine hydrolase polypeptides and fragments of those polypeptides. Procedures for screening and isolating cDNA clones are well-known to those of skill in the art. Such techniques are described in, for example, Sambrook et al. (1989) supra, and Ausubel F M et al. (1989; supplemented through 1999) supra.

[0053] As described in more detail herein, the polynucleotides of the invention include sequences which encode novel triazine hydrolases and sequences complementary to the coding sequences, and novel fragments of coding sequence and complements thereof. The polynucleotides can be in the form of RNA or in the form of DNA, and include mRNA, cRNA, synthetic RNA and DNA, and cDNA. The polynucleotides can be double-stranded or single-stranded, and if single-stranded, can be the coding strand or the non-coding (anti-sense, complementary) strand. The polynucleotides optionally include the coding sequence of a triazine hydrolase (i) in isolation, (ii) in combination with additional coding sequence(s), so as to encode, e.g., a fusion protein, a pre-protein, a prepro-protein, or the like, (iii) in combination with non-coding sequences, such as introns, control elements such as a promoter, a terminator element, or 5′ and/or 3′ untranslated regions effective for expression of the coding sequence in a suitable host, and/or (iv) in a vector or host environment in which the triazine hydrolase coding sequence is a heterologous gene. Sequences can also be found in combination with typical compositional formulations of nucleic acids, including in the presence of carriers, buffers, adjuvants, excipients, vectors, vector components, and the like.

[0054] Using Polynucleotides

[0055] The polynucleotides of the invention have a variety of uses in, for example: recombinant production (i.e., expression) of the triazine hydrolase polypeptides of the invention; as soil or water treatment compositions, e.g., to encode enzymes which degrade triazine, atrazine or other triazine derivatives; as diagnostic probes for the presence of complementary or partially complementary nucleic acids (including for detection of natural triazine hydrolase coding nucleic acids); as substrates for further reactions, e.g., shuffling reactions or mutation reactions to produce new and/or improved triazine hydrolase homologues, and the like.

[0056] Expression of Polypeptides

[0057] In accordance with the present invention, polynucleotide sequences which encode novel triazine hydrolases, fragments of triazine hydrolase fusion proteins, or functional equivalents thereof, collectively referred to herein as “triazine hydrolase polypeptides,” or “triazine hydrolases,” are used in recombinant DNA molecules that direct the expression of the triazine hydrolase polypeptides in appropriate host cells. Due to the inherent degeneracy of the genetic code, other nucleic acid sequences which encode substantially the same or a functionally equivalent amino acid sequence are also used to clone and express the triazine hydrolases.

[0058] Modified Coding Sequences:

[0059] As will be understood by those of skill in the art, it can be advantageous to modify a coding sequence to enhance its expression in a particular host. The genetic code is redundant, with 64 possible codons, but most organisms preferentially use a subset of these codons. The codons that are utilized most often in a species are called optimal codons, and those not utilized very often are classified as rare or low-usage codons (see, e.g., Zhang S P et al. (1991) Gene 105:61-72). Codons can be substituted to reflect the preferred codon usage of the host, a process called “codon optimization” or “controlling for species codon bias.”

[0060] Optimized coding sequence containing codons preferred by a particular prokaryotic or eukaryotic host (see also, Murray, E. et al. (1989) Nuc. Acids Res. 17:477-508) can be prepared, for example, to increase the rate of translation or to produce recombinant RNA transcripts having desirable properties, such as a longer half-life, as compared with transcripts produced from a non-optimized sequence. Translation stop codons can also be modified to reflect host preference. For example, preferred stop codons for S. cerevisiae and mammals are UAA and UGA respectively. The preferred stop codon for monocotyledonous plants is UGA, whereas insects and E. coli prefer to use UAA as the stop codon (Dalphin M E et al. (1996) Nuc. Acids Res. 24: 216-218).

[0061] The polynucleotide sequences of the present invention are optionally engineered in order to alter a triazine hydrolase coding sequence, for a variety of reasons, including, but not limited to, alterations which modify the cloning, processing and/or expression of the gene product. For example, alterations may be introduced using techniques which are well known in the art, e.g., site-directed mutagenesis or de novo synthesis, to insert new restriction sites, to alter glycosylation patterns, to change codon preference, to introduce splice sites, etc.

[0062] Vectors, Promoters and Expression Systems,

[0063] The present invention also includes recombinant constructs comprising one or more of the nucleic acid sequences as broadly described above. The constructs comprise a vector, such as, a plasmid, a cosmid, a phage, a virus, a bacterial artificial chromosome (BAC), a yeast artificial chromosome (YAC), an agrobacterium, or the like, into which a nucleic acid sequence of the invention has been inserted, in a forward or reverse orientation. In a preferred aspect of this embodiment, the construct further comprises regulatory sequences, including, for example, a promoter, operably linked to the sequence. Large numbers of suitable vectors and promoters are known to those of skill in the art, and are commercially available.

[0064] General texts which describe molecular biological techniques useful herein, including the use of vectors, promoters, prokaryotic and eukaryotic cell cloning, and many other relevant topics, include Berger and Kimmel, Guide to Molecular Cloning Techniques Methods in Enzymology volume 152 Academic Press, Inc., San Diego, Calif. (Berger); Sambrook et al., Molecular Cloning—A Laboratory Manual (2nd Ed.), Vol. 1-3, Cold Spring Harbor Laboratory, Cold Spring Harbor, N.Y., 1989 (“Sambrook”) and Current Protocols in Molecular Biology, F. M. Ausubel et al., eds., Current Protocols, a joint venture between Greene Publishing Associates, Inc. and John Wiley & Sons, Inc., (supplemented through 1999) (“Ausubel”)). Examples of techniques sufficient to direct persons of skill through in vitro amplification methods, including the polymerase chain reaction (PCR) the ligase chain reaction (LCR), Qβ-replicase amplification and other RNA polymerase mediated techniques (e.g., NASBA), e.g., for the production of the homologous nucleic acids of the invention are found in Berger, Sambrook, and Ausubel, as well as Mullis et al., (1987) U.S. Pat. No. 4,683,202; PCR Protocols A Guide to Methods and Applications (Innis et al. eds) Academic Press Inc. San Diego, Calif. (1990) (Innis); Arnheim & Levinson (Oct. 1, 1990) C&EN 36-47; The Journal Of NIH Research (1991) 3, 81-94; (Kwoh et al. (1989) Proc. Natl. Acad. Sci. USA 86, 1173; Guatelli et al. (1990) Proc. Natl. Acad. Sci. USA 87, 1874; Lomell et al. (1989) J. Clin. Chem 35, 1826; Landegren et al., (1988) Science 241, 1077-1080; Van Brunt (1990) Biotechnology 8, 291-294; Wu and Wallace, (1989) Gene 4, 560; Barringer et al. (1990) Gene 89, 117, and Sooknanan and Malek (1995) Biotechnology 13: 563-564. Improved methods of cloning in vitro amplified nucleic acids are described in Wallace et al., U.S. Pat. No. 5,426,039. Improved methods of amplifying large nucleic acids by PCR are summarized in Cheng et al. (1994) Nature 369: 684-685 and the references therein, in which PCR amplicons of up to 40 kb are generated. One of skill will appreciate that essentially any RNA can be converted into a double stranded DNA suitable for restriction digestion, PCR expansion and sequencing using reverse transcriptase and a polymerase. See, Ausubel, Sambrook and Berger, all supra.

[0065] The present invention also relates to host cells which are transduced with vectors of the invention, and the production of polypeptides of the invention by recombinant techniques. Host cells are genetically engineered (i.e., transduced, transformed or transfected) with the vectors of this invention, which may be, for example, a cloning vector or an expression vector. The vector may be, for example, in the form of a plasmid, a viral particle, a phage, etc. The engineered host cells can be cultured in conventional nutrient media modified as appropriate for activating promoters, selecting transformants, or amplifying the triazine hydrolase gene. The culture conditions, such as temperature, pH and the like, are those previously used with the host cell selected for expression, and will be apparent to those skilled in the art and in the references cited above. Additional useful references for cloning and culture of cells include, including, e.g., Freshney (1994) Culture of Animal Cells, a Manual of Basic Technique, third edition, Wiley-Liss, New York and the references cited therein, Payne et al. (1992) Plant Cell and Tissue Culture in Liquid Systems John Wiley & Sons, Inc. New York, N.Y., and Atlas and Parks (eds) The Handbook of Microbiological Media (1993) CRC Press, Boca Raton, Fla.

[0066] The triazine hydrolase proteins of the invention can also be produced in non-animal cells such as plants, yeast, fungi, bacteria and the like. For example, bacteria expressing the polypeptides of the invention are optionally used to degrade triazine compounds, e.g., in triazine contaminated water or soil. In addition to Sambrook, Berger and Ausubel, details regarding plant cell culture can be found in Gamborg and Phillips (eds) (1995) Plant Cell, Tissue and Organ Culture; Fundamental Methods Springer Lab Manual, Springer-Verlag (Berlin Heidelberg New York).

[0067] The polynucleotides of the present invention may be included in any one of a variety of expression vectors for expressing a polypeptide. Such vectors include chromosomal, nonchromosomal and synthetic DNA sequences, e.g., derivatives of SV40; bacterial plasmids; phage DNA; baculovirus; yeast plasmids; vectors derived from combinations of plasmids and phage DNA, viral DNA such as vaccinia, adenovirus, fowl pox virus, pseudorabies, adenovirus, adeno-associated virus, retroviruses, agrobacterium, and many others. Any vector that transduces genetic material into a cell, and, if replication is desired, which is replicable and viable in the relevant host can be used depending on where expression is desired.

[0068] The nucleic acid sequence in the expression vector is operatively linked to an appropriate transcription control sequence (promoter) to direct mRNA synthesis. Examples of such promoters include: LTR or SV40 promoter, E. coli lac or trp promoter, phage lambda P_{L} promoter, and other promoters known to control expression of genes in prokaryotic or eukaryotic cells or their viruses. The expression vector also contains a ribosome binding site for translation initiation, and a transcription terminator. The vector optionally includes appropriate sequences for amplifying expression. In addition, the expression vectors optionally comprise one or more selectable marker genes to provide a phenotypic trait for selection of transformed host cells, such as dihydrofolate reductase or neomycin resistance for eukaryotic cell culture, or such as tetracycline or ampicillin resistance in E. coli.

[0069] The vector containing the appropriate DNA sequence as described above, as well as an appropriate promoter or control sequence, may be employed to transform an appropriate host to permit the host to express the protein. Examples of appropriate expression hosts especially include bacterial cells, such as E. coli, Streptomyces, and Salmonella typhimurium; as well as fungal cells, such as Saccharomyces cerevisiae, Pichiapastoris, and Neurospora crassa; insect cells such as Drosophila and Spodoptera frugiperda; mammalian cells; plant cells, etc. It is understood that not all cells or cell lines need to be capable of producing fully functional triazine hydrolase; for example, antigenic fragments of a triazine hydrolase are optionally produced in a bacterial or other expression system for generation of useful antibodies, as described in more detail below. The invention is not limited by the host cells employed.

[0070] In bacterial systems, a number of expression vectors may be selected depending upon the use intended for the triazine hydrolase. For example, when large quantities of triazine hydrolase or fragments thereof are needed for the induction of antibodies, vectors which direct high level expression of fusion proteins that are readily purified may be desirable. Such vectors include, but are not limited to, multifunctional E. coli cloning and expression vectors such as BLUESCRIPT (Stratagene), in which the triazine hydrolase coding sequence is optionally ligated into the vector in-frame with sequences for the amino-terminal Met and the subsequent 7 residues of beta-galactosidase so that a hybrid protein is produced; pIN vectors (Van Heeke & Schuster (1989) J Biol Chem 264:5503-5509); pET vectors (Novagen, Madison Wis.); and the like.

[0071] In certain embodiments of the present invention, chimeric nucleic acids or other sequences are introduced into the cells of particular organisms of interest. There are several well-known methods of introducing target nucleic acids into, e.g., bacterial cells, any of which may be used in the present invention. These include: fusion of the recipient cells with bacterial protoplasts containing the DNA, electroporation, projectile bombardment, and infection with viral vectors, etc. Bacterial cells can be used to amplify the number of plasmids containing DNA constructs of this invention.

[0072] Bacteria are typically grown to log phase and the plasmids within the bacteria can be isolated by a variety of methods known in the art (see, for instance, Sambrook). In addition, a plethora of kits are commercially available for the purification of plasmids from bacteria. For their proper use, follow the manufacturer's instructions (see, for example, EasyPrep™, FlexiPrep™, both from Pharmacia Biotech; StrataClean™, from Stratagene; and, QIAexpress Expression System™ from Qiagen). The isolated and purified plasmids are then further manipulated to produce other plasmids.

[0073] Typical vectors contain transcription and translation terminators, transcription and translation initiation sequences, and promoters useful for regulation of the expression of the particular target nucleic acid. The vectors optionally comprise generic expression cassettes containing at least one independent terminator sequence, sequences permitting replication of the cassette in eukaryotes, or prokaryotes, or both, (e.g., shuttle vectors) and selection markers for both prokaryotic and eukaryotic systems. Vectors are suitable for replication and integration in prokaryotes, eukaryotes, or preferably both. See, Giliman & Smith, Gene 8:81 (1979); Roberts, et al., Nature, 328:731 (1987); Schneider, B., et al., Protein Expr. Purif. 6435:10 (1995); Ausubel, Sambrook, Berger (all supra). A catalogue of Bacteria and Bacteriophages useful for cloning is provided, e.g., by the ATCC, e.g., The ATCC Catalogue of Bacteria and Bacteriophage (1992) Gherna et al. (eds) published by the ATCC.

[0074] Additional basic procedures for sequencing, cloning and other aspects of molecular biology and underlying theoretical considerations are also found in Watson et al. (1992) Recombinant DNA Second Edition Scientific American Books, NY. Furthermore, a wide variety of cloning kits and associated products are commercially available from, e.g., Pharmacia Biotech, Stratagene, Sigma-Aldrich Co., Novagen, Inc., Fermentas, and 5 Prime→3 Prime, Inc.

[0075] Similarly, in the yeast Saccharomyces cerevisiae a number of vectors containing constitutive or inducible promoters such as alpha factor, alcohol oxidase and PGH may be used for production of the triazine hydrolase proteins of the invention. For reviews, see Ausubel et al. (supra) and Grant et al. (1987; Methods in Enzymology 153:516-544).

[0076] Additional Expression Elements

[0077] Specific initiation signals can aid in efficient translation of a triazine hydrolase coding sequence. These signals can include, e.g., the ATG initiation codon and adjacent sequences. In cases where a triazine hydrolase coding sequence, its initiation codon and upstream sequences are inserted into the appropriate expression vector, no additional translational control signals may be needed. However, in cases where only coding sequence (e.g., a mature protein coding sequence), or a portion thereof, is inserted, exogenous transcriptional control signals including the ATG initiation codon can be provided. The initiation codon is provided in the correct reading frame to ensure transcription of the entire insert. Exogenous transcriptional elements and initiation codons can be of various origins, both natural and synthetic. The efficiency of expression may be enhanced by the inclusion of enhancers appropriate to the cell system in use (See also, Scharf D et al. (1994) Results Probl Cell Differ 20:125-62 and Bittner et al. (1987) Methods in Enzymol 153:516-544).

[0078] Secretion/Localization Sequences

[0079] Polynucleotides of the invention can also be fused, for example, in-frame to a nucleic acid encoding a secretion/localization sequence, to target polypeptide expression to a desired cellular compartment, membrane, or organelle, or to direct polypeptide secretion to the periplasmic space or into the cell culture media. Such sequences are known to those of skill, and include secretion leader peptides, organelle targeting sequences (e.g., nuclear localization sequences, ER retention signals, mitochondrial transit sequences, chloroplast transit sequences), membrane localization/anchor sequences (e.g., stop transfer sequences, GPI anchor sequences), and the like.

[0080] Expression Hosts

[0081] In a further embodiment, the present invention relates to host cells containing the above-described constructs. The host cell can be a eukaryotic cell, such as a mammalian cell, a yeast cell, or a plant cell, or the host cell can be a prokaryotic cell, such as a bacterial cell. For bioremediation, bacterial cells are often preferred. Introduction of the construct into the host cell can be effected by calcium phosphate transfection, DEAE-Dextran mediated transfection, electroporation, or other common techniques (See, e.g., Sambrook, Ausubel, Berger (all supra). See also, Davis, L., Dibner, M., and Battey, I. (1986) Basic Methods in Molecular Biology).

[0082] A host cell strain is optionally chosen for its ability to modulate the expression of the inserted sequences or to process the expressed protein in the desired fashion. Such modifications of the protein include, but are not limited to, acetylation, carboxylation, glycosylation, phosphorylation, lipidation and acylation. Post-translational processing which cleaves a “pre” or a “prepro” form of the protein may also be important for correct insertion, folding and/or function. Different host cells such as CHO, HeLa, BHK, MDCK, 293, WI38, etc. have specific cellular machinery and characteristic mechanisms for such post-translational activities and may be chosen to ensure the correct modification and processing of the introduced, foreign protein.

[0083] For long-term, high-yield production of recombinant proteins, stable expression can be used. For example, cell lines which stably express a polypeptide of the invention are transduced using expression vectors which contain viral origins of replication or endogenous expression elements and a selectable marker gene. Following the introduction of the vector, cells may be allowed to grow for 1-2 days in an enriched media before they are switched to selective media. The purpose of the selectable marker is to confer resistance to selection, and its presence allows growth and recovery of cells which successfully express the introduced sequences. For example, resistant clumps of stably transformed cells can be proliferated using tissue culture techniques appropriate to the cell type.

[0084] Host cells transformed with a nucleotide sequence encoding a polypeptide of the invention are optionally cultured under conditions suitable for the expression and recovery of the encoded protein from cell culture. The protein or fragment thereof produced by a recombinant cell may be secreted, membrane-bound, or contained intracellularly, depending on the sequence and/or the vector used. As will be understood by those of skill in the art, expression vectors containing polynucleotides encoding triazine hydrolases of the invention can be designed with signal sequences which direct secretion of the mature polypeptides through a prokaryotic or eukaryotic cell membrane, e.g., for use in bioremediation.

[0085] Additional Polypeptide Sequences

[0086] The polynucleotides of the present invention may also comprise a coding sequence fused in-frame to a marker sequence which, e.g., facilitates purification of the encoded polypeptide. Such purification facilitating domains include, but are not limited to, metal chelating peptides such as histidine-tryptophan modules that allow purification on immobilized metals, a sequence which binds glutathione (e.g., GST), a hemagglutinin (HA) tag (corresponding to an epitope derived from the influenza hemagglutinin protein; Wilson, I., et al. (1984) Cell 37:767), maltose binding protein sequences, the FLAG epitope utilized in the FLAGS extension/affinity purification system (Immunex Corp, Seattle, Wash.), and the like. The inclusion of a protease-cleavable polypeptide linker sequence between the purification domain and the triazine hydrolase sequence is useful to facilitate purification.

[0087] One expression vector contemplated for use in the compositions and methods described herein provides for expression of a fusion protein comprising a polypeptide of the invention fused to a polyhistidine region separated by an enterokinase cleavage site. The histidine residues facilitate purification on IMIAC (immobilized metal ion affinity chromatography, as described in Porath et al. (1992) Protein Expression and Purification 3:263-281) while the enterokinase cleavage site provides a means for separating the triazine hydrolase polypeptide from the fusion protein. pGEX vectors (Promega; Madison, Wis.) may also be used to express foreign polypeptides as fusion proteins with glutathione S-transferase (GST). In general, such fusion proteins are soluble and can easily be purified from lysed cells by adsorption to ligand-agarose beads (e.g., glutathione-agarose in the case of GST-fusions) followed by elution in the presence of free ligand.

[0088] Polypeptide Production and Recovery

[0089] Following transduction of a suitable host strain and growth of the host strain to an appropriate cell density, the selected promoter is induced by appropriate means (e.g., temperature shift or chemical induction) and cells are cultured for an additional period. Cells are typically harvested by centrifugation, disrupted by physical or chemical means, and the resulting crude extract retained for further purification. Microbial cells employed in expression of proteins can be disrupted by any convenient method, including freeze-thaw cycling, sonication, mechanical disruption, or use of cell lysing agents, or other methods, which are well know to those skilled in the art.

[0090] As noted, many references are available for the culture and production of many cells, including cells of bacterial, plant, animal (especially mammalian) and archebacterial origin. See e.g., Sambrook, Ausubel, and Berger (all supra), as well as Freshney (1994) Culture of Animal Cells, a Manual of Basic Technique, third edition, Wiley-Liss, New York and the references cited therein; Doyle and Griffiths (1997) Mammalian Cell Culture: Essential Techniques John Wiley and Sons, NY; Humason (1979) Animal Tissue Techniques, fourth edition W.H. Freeman and Company; and Ricciardelli, et al., (1989) In vitro Cell Dev. Biol. 25:1016-1024. For plant cell culture and regeneration, Payne et al. (1992) Plant Cell and Tissue Culture in Liquid Systems John Wiley & Sons, Inc. New York, N.Y.; Gamborg and Phillips (eds) (1995) Plant Cell, Tissue and Organ Culture; Fundamental Methods Springer Lab Manual, Springer-Verlag (Berlin Heidelberg New York) and Plant Molecular Biolgy (1993) R. R. D. Croy, Ed. Bios Scientific Publishers, Oxford, U.K. ISBN 0 12 198370 6. Cell culture media in general are set forth in Atlas and Parks (eds) The Handbook of Microbiological Media (1993) CRC Press, Boca Raton, Fla. Additional information for cell cultures is found in available commercial literature such as the Life Science Research Cell Culture Catalogue (1998) from Sigma-Aldrich, Inc (St Louis, Mo.) (“Sigma-LSRCCC”) and, e.g., the Plant Culture Catalogue and supplement (1997) also from Sigma-Aldrich, Inc (St Louis, Mo.) (“Sigma-PCCS”).

[0091] Polypeptides of the invention can be recovered and purified from recombinant cell cultures by any of a number of methods well known in the art, including ammonium sulfate or ethanol precipitation, acid extraction, anion or cation exchange chromatography, phosphocellulose chromatography, hydrophobic interaction chromatography, affinity chromatography (e.g., using any of the tagging systems noted herein), hydroxylapatite chromatography, and lectin chromatography. Protein refolding steps can be used, as desired, in completing configuration of the mature protein. Finally, high performance liquid chromatography (HPLC) can be employed in the final purification steps. In addition to the references noted supra, a variety of purification methods are well known in the art, including, e.g., those set forth in Sandana (1997) Bioseparation of Proteins, Academic Press, Inc.; and Bollag et al. (1996) Protein Methods, 2^{nd} Edition Wiley-Liss, NY; Walker (1996) The Protein Protocols Handbook Humana Press, NJ, Harris and Angal (1990) Protein Purification Applications: A Practical Approach IRL Press at Oxford, Oxford, England; Harris and Angal Protein Purification Methods: A Practical Approach IRL Press at Oxford, Oxford, England; Scopes (1993) Protein Purification: Principles and Practice 3^{rd} Edition Springer Verlag, NY; Janson and Ryden (1998) Protein Purification: Principles, High Resolution Methods and Applications, Second Edition Wiley-VCH, NY; and Walker (1998) Protein Protocols on CD-ROM Humana Press, NJ.

[0092] In vitro Expression Systems

[0093] Cell-free transcription/translation systems can also be employed to produce polypeptides using DNAs or RNAs of the present invention. Several such systems are commercially available. A general guide to in vitro transcription and translation protocols is found in Tymms (1995) In vitro Transcription and Translation Protocols: Methods in Molecular Biology Volume 37, Garland Publishing, NY.

[0094] Modified Amino Acids

[0095] Polypeptides of the invention may contain one or more modified amino acid. The presence of modified amino acids may be advantageous in, for example, (a) increasing polypeptide serum half-life, (b) reducing polypeptide antigenicity, and (c) increasing polypeptide storage stability. Amino acid(s) are modified, for example, co-translationally or post-translationally during recombinant production (e.g., N-linked glycosylation at N-X-S/T motifs during expression in mammalian cells) or modified by synthetic means.

[0096] Non-limiting examples of a modified amino acid include a glycosylated amino acid, a sulfated amino acid, a prenlyated (e.g., farnesylated, geranylgeranylated) amino acid, an acetylated amino acid, an acylated amino acid, a PEG-ylated amino acid, a biotinylated amino acid, a carboxylated amino acid, a phosphorylated amino acid, and the like. References adequate to guide one of skill in the modification of amino acids are replete throughout the literature. Example protocols are found in Walker (1998) Protein Protocols on CD-ROM Human Press, Towata, N.J.

[0097] Use as Probes

[0098] Also contemplated are uses of polynucleotides, also referred to herein as oligonucleotides, typically having at least 12 bases, preferably at least 15, more preferably at least about 20, about 30, about 50 bases, or about 75 bases or more, which hybridize under highly stringent conditions to a triazine hydrolase polynucleotide as described above. The polynucleotides are optionally used as probes, primers, sense and antisense agents, and the like, according to methods as noted supra.

[0099] Sequence Variations

[0100] Silent Variations

[0101] It will be appreciated by those skilled in the art that due to the degeneracy of the genetic code, a multitude of nucleic acid sequences encoding triazine hydrolase polypeptides of the invention are optionally produced, some of which may bear minimal sequence homology to the nucleic acid sequences explicitly disclosed herein.

TABLE 1
Codon Table

| Amino acids | | | Codon |
|---|---|---|---|
| Alanine | Ala | A | GCA GCC GCG GCU |
| Gysteine | Cys | C | UGC UGU |
| Aspartic acid | Asp | D | GAC GAU |
| Glutaniic acid | Glu | E | GAA GAG |
| Phenylalanine | Phe | F | UUC UUU |
| Glycine | Gly | G | GGA GGG GGG GGU |
| Histidine | His | H | CAC CAU |
| Isoleucine | Ile | I | AUA AUC AUU |
| Lysine | Lys | K | AAA AAG |
| Leucine | Leu | L | UUA UUG CUA CUC CUG CUU |
| Methionine | Met | M | AUG |
| Asparagine | Asn | N | AAC AAU |
| Proline | Pro | P | CCA CCC CCG CCU |
| Glutamine | Gln | Q | CAA CAG |
| Arginine | Arg | R | AGA AGG CGA CGC CGG CGU |
| Serine | Ser | S | AGC AGU UCA UCC UCG UCU |
| Threonine | Thr | T | ACA ACC ACG ACU |
| Valine | Val | V | GUA GUC GUG GUU |
| Tryptophan | Trp | W | UGG |
| Tyrosine | Tyr | Y | UAG UAU |

[0102] For instance, inspection of the codon table (Table 1) shows that codons AGA, AGG, CGA, CGC, CGG, and CGU all encode the amino acid arginine. Thus, at every position in the nucleic acids of the invention where an arginine is specified by a codon, the codon can be altered to any of the corresponding codons described above without altering the encoded polypeptide. It is understood that U in an RNA sequence corresponds to T in a DNA sequence.

[0103] Using, as an example, the nucleic acid sequence corresponding to nucleotides 1-15 of SEQ ID NO: 1, ATG CAA ACG CTC AGC, a silent variation of this sequence includes ATG CAG ACC TTA AGT, both sequences which encode the amino acid sequence MQTLS, corresponding to amino acids 1-5 of SEQ ID NO:49.

[0104] Such “silent variations” are one species of “conservatively modified variations”, discussed below. One of skill will recognize that each codon in a nucleic acid (except AUG, which is ordinarily the only codon for methionine) can be modified by standard techniques to encode a functionally identical polypeptide. Accordingly, each silent variation of a nucleic acid which encodes a polypeptide is implicit in any described sequence. The invention provides each and every possible variation of nucleic acid sequence encoding a polypeptide of the invention that could be made by selecting combinations based on possible codon choices. These combinations are made in accordance with the standard triplet genetic code (e.g., as set forth in Table 1) as applied to the nucleic acid sequence encoding a triazine hydrolase polypeptide of the invention. All such variations of every nucleic acid herein are specifically provided and described by consideration of the sequence in combination with the genetic code.

[0105] Conservative Variations

[0106] “Conservatively modified variations” or, simply, “conservative variations” of a particular nucleic acid sequence refers to those nucleic acids which encode identical or essentially identical amino acid sequences, or, where the nucleic acid does not encode an amino acid sequence, to essentially identical sequences. One of skill will recognize that individual substitutions, deletions, or additions which alter, add, or delete a single amino acid or a small percentage of amino acids (typically less than 5%, more typically less than 4%, 2% or 1%) in an encoded sequence are “conservatively modified variations” where the alterations result in the deletion of an amino acid, addition of an amino acid, or substitution of an amino acid with a chemically similar amino acid.

[0107] Conservative substitution tables providing functionally similar amino acids are well known in the art. Table 2 sets forth six groups which contain amino acids that are “conservative substitutions” for one another.

TABLE 2
Conservative Substitution Groups

| | | | | |
|---|---|---|---|---|
| 1 | Alanine (A) | Serine (S) | Threonine (T) | |
| 2 | Aspartic acid (D) | Glutamic acid (E) | | |
| 3 | Asparagine (N) | Glutamine (Q) | | |
| 4 | Arginine (R) | Lysine (K) | | |
| 5 | Isoleucine (I) | Leucine (L) | Methionine (M) | Valine (V) |
| 6 | Phenylalanine (F) | Tyrosine (Y) | Tryptophan (W) | |

[0108] Thus, “conservatively substituted variations” of a listed polypeptide sequence of the present invention include substitutions of a small percentage, typically less than 5%, more typically less than 2% or 1%, of the amino acids of the polypeptide sequence, with a conservatively selected amino acid of the same conservative substitution group.

[0109] For example, a conservatively substituted variation of the polypeptide identified herein as SEQ ID NO:49 will contain “conservative substitutions”, according to the six groups defined above, in up to 23 residues (i.e., 5% of the amino acids) in the 474 amino acid polypeptide.

[0110] In a further example, if four conservative substitutions were localized in the region corresponding to amino acids 70-81 of SEQ ID NO:49, examples of conservatively substituted variations of this region,

[0111] NQI LLR GGP SHG include:

[0112] NNI LLK GGP AHG and

[0113] QQL IMR GGP THG and the like, in accordance with the conservative substitutions listed in Table 2 (in the above example, conservative substitutions are underlined). Listing of a protein sequence herein, in conjunction with the above substitution table, provides an express listing of all conservatively substituted proteins.

[0114] Finally, the addition of sequences which do not alter the encoded activity of a nucleic acid molecule, such as the addition of a non-functional sequence, is a conservative variation of the basic nucleic acid.

[0115] One of skill will appreciate that many conservative variations of the nucleic acid constructs which are disclosed yield a functionally identical construct. For example, as discussed above, owing to the degeneracy of the genetic code, “silent substitutions” (i.e., substitutions in a nucleic acid sequence which do not result in an alteration in an encoded polypeptide) are an implied feature of every nucleic acid sequence which encodes an amino acid. Similarly, “conservative amino acid substitutions,” in one or a few amino acids in an amino acid sequence are substituted with different amino acids with highly similar properties, are also readily identified as being highly similar to a disclosed construct. Such conservative variations of each disclosed sequence are a feature of the present invention.

[0116] Nucleic Acid Hybridization

[0117] Nucleic acids “hybridize” when they associate, typically in solution. Nucleic acids hybridize due to a variety of well characterized physico-chemical forces, such as hydrogen bonding, solvent exclusion, base stacking and the like. An extensive guide to the hybridization of nucleic acids is found in Tijssen (1993) Laboratory Techniques in Biochemistry and Molecular Biology—Hybridization with Nucleic Acid Probes part I chapter 2, “Overview of principles of hybridization and the strategy of nucleic acid probe assays,” (Elsevier, N.Y.), as well as in Ausubel, supra. Hames and Higgins (1995) Gene Probes 1 IRL Press at Oxford University Press, Oxford, England, (Hames and Higgins 1) and Hames and Higgins (1995) Gene Probes 2 IRL Press at Oxford University Press, Oxford, England (Hames and Higgins 2) provide details on the synthesis, labeling, detection and quantification of DNA and RNA, including oligonucleotides.

[0118] “Stringent hybridization wash conditions” in the context of nucleic acid hybridization experiments such as Southern and Northern hybridizations are sequence dependent, and are different under different environmental parameters. An extensive guide to the hybridization of nucleic acids is found in Tijssen (1993), supra. and in Hames and Higgins, 1 and 2.

[0119] For purposes of the present invention, generally, “highly stringent” hybridization and wash conditions are selected to be about 5° C. lower than the thermal melting point (Tₘ) for the specific sequence at a defined ionic strength and pH. The Tₘ is the temperature (under defined ionic strength and pH) at which 50% of the test sequence hybridizes to a perfectly matched probe. Very stringent conditions are selected to be equal to the Tₘ for a particular probe.

[0120] An example of stringent hybridization conditions for hybridization of complementary nucleic acids which have more than 100 complementary residues on a filter in a Southern or Northern blot is 50% formalin with 1 mg of heparin at 42° C., with the hybridization being carried out overnight. An example of stringent wash conditions is a 0.2× SSC wash at 65° C. for 15 minutes (see, Sambrook, supra for a description of SSC buffer). Often the high stringency wash is preceded by a low stringency wash to remove background probe signal. An example low stringency wash is 2× SSC at 40° C. for 15 minutes. In general, a signal to noise ratio of 5× (or higher) than that observed for an unrelated probe in the particular hybridization assay indicates detection of a specific hybridization.

[0121] Comparative hybridization can be used to identify nucleic acids of the invention, and this comparative hybridization method is a preferred method of distinguishing nucleic acids of the invention.

[0122] In particular, detection of highly stringent hybridization in the context of the present invention indicates strong structural similarity to, e.g., the nucleic acids provided in the sequence listing herein. For example, it is desirable to identify test nucleic acids which hybridize to the exemplar nucleic acids herein under stringent conditions. One measure of stringent hybridization is the ability to hybridize to one of the listed nucleic acids, e.g., nucleic acid sequences SEQ ID NO: 1 to SEQ ID NO:48 and complementary polynucleotide sequences thereof, under highly stringent conditions. Stringent hybridization and wash conditions can easily be determined empirically for any test nucleic acid.

[0123] For example, in determining highly stringent hybridization and wash conditions, the hybridization and wash conditions are gradually increased (e.g., by increasing temperature, decreasing salt concentration, increasing detergent concentration and/or increasing the concentration of organic solvents such as formalin in the hybridization or wash), until a selected set of criteria are met. For example, the hybridization and wash conditions are gradually increased until a probe comprising one or more nucleic acid sequences selected from SEQ ID NO: 1 to SEQ ID NO:48 and complementary polynucleotide sequences thereof, binds to a perfectly matched complementary target (again, a nucleic acid comprising one or more nucleic acid sequences selected from SEQ ID NO:1 to SEQ ID NO:48 and complementary polynucleotide sequences thereof), with a signal to noise ratio that is at least 5× as high as that observed for hybridization of the probe to an unmatched target. In this case, the unmatched target is a nucleic acid corresponding to a known triazine hydrolase, e.g., a triazine hydrolase nucleic acid (other than those in the accompanying sequence listing) that is present in a public database such as GenBank™ at the time of filing of the subject application. An example of such an unmatched target nucleic acid includes, e.g., the nucleic acids corresponding to GenBank accession number: U55933 and AF312304. Additional such sequences can be identified in GenBank by one of skill.

[0124] A test nucleic acid is said to specifically hybridize to a probe nucleic acid when it hybridizes at least half as well to the probe as to the perfectly matched complementary target, i.e., with a signal to noise ratio at least half as high as hybridization of the probe to the target under conditions in which the perfectly matched probe binds to the perfectly matched complementary target with a signal to noise ratio that is at least about 3×-10× as high as that observed for hybridization to any of the unmatched target nucleic acids, such as U55933 or AF312304.

[0125] Ultra high-stringency hybridization and wash conditions are those in which the stringency of hybridization and wash conditions are increased until the signal to noise ratio for binding of the probe to the perfectly matched complementary target nucleic acid is at least 5× as high as that observed for hybridization to any of the unmatched target nucleic acids, such as U55933 or AF312304. A target nucleic acid which hybridizes to a probe under such conditions, with a signal to noise ratio of at least half that of the perfectly matched complementary target nucleic acid is said to bind to the probe under ultra-high stringency conditions.

[0126] Similarly, even higher levels of stringency can be determined by gradually increasing the hybridization and/or wash conditions of the relevant hybridization assay. For example, those in which the stringency of hybridization and wash conditions are increased until the signal to noise ratio for binding of the probe to the perfectly matched complementary target nucleic acid is at least 10×, 20×, 50×, 100×, or even 500× or more as high as that observed for hybridization to any of the unmatched target nucleic acids (U55933) can be identified. A target nucleic acid which hybridizes to a probe under such conditions, with a signal to noise ratio of at least half that of the perfectly matched complementary target nucleic acid is said to bind to the probe under ultra-ultra-high stringency conditions.

[0127] Target nucleic acids which hybridize to the nucleic acids represented by SEQ ID NO:1 to SEQ ID NO:48 under high, ultra-high and ultra-ultra high stringency conditions are a feature of the invention. Examples of such nucleic acids include those with one or a few silent or conservative nucleic acid substitutions as compared to a given nucleic acid sequence.

[0128] Nucleic acids which do not hybridize to each other under stringent conditions are still substantially identical if the polypeptides which they encode are substantially identical. This occurs, e.g., when a nucleic acid is created using the maximum codon degeneracy permitted by the genetic code, or when the polypeptide encoded by the nucleic acid binds to antisera generated against one or more of SEQ ID NO:49 to SEQ ID NO:608 which has been subtracted using the polypeptides encoded by an atrazine hydrolase sequence in GenBank, such as U55933. Further details on immunological identification of polypeptides of the invention are found below.

[0129] In one aspect, the invention provides a nucleic acid which comprises a unique subsequence in a nucleic acid selected from SEQ ID NO:1 to SEQ ID NO:48. The unique subsequence is unique as compared to a nucleic acid corresponding to U55933 or any other triazine hydrolase homologue nucleic acid (other than those in the accompanying sequence listing) that is present in a public database such as GenBank™ at the time of filing of the subject application. Such unique subsequences can be determined by aligning any of SEQ ID NO:1 to SEQ ID NO:48 against the complete set of nucleic acids corresponding to known atrazine or triazine hydrolases. Alignment can be performed using the BLAST algorithm set to default parameters. Any unique subsequence is useful, e.g., as a probe to identify the nucleic acids of the invention.

[0130] Similarly, the invention includes a polypeptide which comprises a unique subsequence in a polypeptide selected from: SEQ ID NO: 49 to SEQ ID NO: 608. Here, the unique subsequence is unique as compared to a polypeptide corresponding U55933, AF312304, or any other triazine hydrolase homologue nucleic acid (other than those in the accompanying sequence listing) that is present in a public database such as GenBank™ at the time of filing of the subject application (the control polypeptides) (note that where the sequence corresponds to a non-translated sequence such as a pseudo gene, the corresponding polypeptide is generated simply by in silico translation of the nucleic acid sequence into an amino acid sequence, where the reading frame is selected to correspond to the reading frame of homologous triazine hydrolase nucleic acids.

[0131] The invention also provides for target nucleic acids that hybridize under stringent conditions to a unique coding oligonucleotide which encodes a unique subsequence in a polypeptide selected from: SEQ ID NO:49 to SEQ ID NO:608, wherein the subsequence is unique as compared to a polypeptide corresponding to any of the control polypeptides, e.g., the polypeptide encoded by the nucleic acid represented by U55933, AF312304, or any other triazine hydrolase nucleic acid that is present in a public database such as GenBank™ at the time of filing of the subject application. Unique sequences are determined as noted above.

[0132] In one example, the stringent conditions are selected such that a perfectly complementary oligonucleotide to the coding oligonucleotide hybridizes to the coding oligonucleotide with at least about a 5-10× higher signal to noise ratio than for hybridization of the perfectly complementary oligonucleotide to a control nucleic acid corresponding to any of the control polypeptides. Conditions can be selected such that higher ratios of signal to noise are observed in the particular assay which is used, e.g., about 15×, 20×, 30×, 50× or more. In this example, the target nucleic acid hybridizes to the unique coding oligonucleotide with at least a 2× higher signal to noise ratio as compared to hybridization of the control nucleic acid to the coding oligonucleotide. Again, higher signal to noise ratios can be selected, e.g., about 5×, 10×, 20×, 30×, 50× or more. The particular signal will depend on the label used in the relevant assay, e.g., a fluorescent label, a colorimetric label, a radio active label, or the like.

[0133] Substrates and Formats for Sequence Recombination

[0134] The polynucleotides of the invention are optionally used as substrates for a variety of recombination and recursive recombination (e.g., DNA shuffling) reactions and/or other diversity generating reactions, in addition to or concurrent with standard cloning methods, to produce triazine hydrolase homologues with desired properties. A variety of such reactions are known, including those developed by the inventors and their co-workers.

[0135] The following publications describe a variety of recursive recombination procedures and/or methods which can be incorporated into such procedures: Stemmer, et al., (1999) “Molecular breeding of viruses for targeting and other clinical properties. Tumor Targeting” 4:1-4; Nesset al. (1999) “DNA Shuffling of subgenomic sequences of subtilisin” Nature Biotechnology 17:893-896; Chang et al. (1999) “Evolution of a cytokine using DNA family shuffling” Nature Biotechnology 17:793-797; Minshull and Stemmer (1999) “Protein evolution by molecular breeding” Current Opinion in Chemical Biology 3:284-290; Christians et al. (1999) “Directed evolution of thymidine kinase for AZT phosphorylation using DNA family shuffling” Nature Biotechnology 17:259-264; Crameriet al. (1998) “DNA shuffling of a family of genes from diverse species accelerates directed evolution” Nature 391:288-291; Crameri et al. (1997) “Molecular evolution of an arsenate detoxification pathway by DNA shuffling,” Nature Biotechnology 15:436-438; Zhang et al. (1997) “Directed evolution of an effective fucosidase from a galactosidase by DNA shuffling and screening” Proceedings of the National Academy of Sciences, U.S.A. 94:4504-4509; Patten et al. (1997) “Applications of DNA Shuffling to Pharmaceuticals and Vaccines” Current Opinion in Biotechnology 8:724-733; Crameri et al. (1996) “Construction and evolution of antibody-phage libraries by DNA shuffling” Nature Medicine 2:100-103; Crameri et al. (1996) “Improved green fluorescent protein by molecular evolution using DNA shuffling” Nature Biotechnology 14:315-319; Gates et al. (1996) “Affinity selective isolation of ligands from peptide libraries through display on a lac repressor ‘headpiece dimer’” Journal of Molecular Biology 255:373-386; Stemmer (1996) “Sexual PCR and Assembly PCR” In: The Encyclopedia of Molecular Biology. VCH Publishers, New York. pp.447-457; Crameri and Stemmer (1995) “Combinatorial multiple cassette mutagenesis creates all the permutations of mutant and wildtype cassettes” BioTechniques 18:194-195; Stemmer et al., (1995) “Single-step assembly of a gene and entire plasmid form large numbers of oligodeoxyribonucleotides” Gene, 164:49-53; Stemmer (1995) “The Evolution of Molecular Computation” Science 270: 1510; Stemmer (1995) “Searching Sequence Space” Bio/Technology 13:549-553; Stemmer (1994) “Rapid evolution of a protein in vitro by DNA shuffling” Nature 370:389-391; and Stemmer (1994) “DNA shuffling by random fragmentation and reassembly: In vitro recombination for molecular evolution.” Proceedings of the National Academy of Sciences. U.S.A. 91:10747-10751.

[0136] Additional details regarding DNA shuffling methods are found in U.S. patents by the inventors and their co-workers, including: U.S. Pat. No. 5,605,793 to Stemmer (Feb. 25, 1997), “METHODS FOR IN VITRO RECOMBINATION;” U.S. Pat. No. 5,811,238 to Stemmer et al. (Sep. 22, 1998) “METHODS FOR GENERATING POLYNUCLEOTIDES HAVING DESIRED CHARACTERISTICS BY ITERATIVE SELECTION AND RECOMBINATION;” U.S. Pat. No. 5,830,721 to Stemmer et al. (Nov. 3, 1998), “DNA MUTAGENESIS BY RANDOM FRAGMENTATION AND REASSEMBLY;” U.S. Pat. No. 5,834,252 to Stemmer, et al. (Nov. 10, 1998) “END-COMPLEMENTARY POLYMERASE REACTION,” and U.S. Pat. No. 5,837,458 to Minshull, et al. (Nov. 17, 1998), “METHODS AND COMPOSITIONS FOR CELLULAR AND METABOLIC ENGINEERING.”

[0137] In addition, details and formats for DNA shuffling are found in a variety of PCT and foreign patent application publications, including: Stemmer and Crameri, “DNA MUTAGENESIS BY RANDOM FRAGMENTATION AND REASEMBLY” WO 95/22625; Stemmer and Lipschutz “END COMPLEMENTARY POLYMERASE CHAIN REACTION” WO 96/33207; Stemmer and Crameri “METHODS FOR GENERATING POLYNUCLEOTIDES HAVING DESIRED CHARACTERISTICS BY ITERATIVE SELECTION AND RECOMBINATION” WO 97/0078; Minshull and Stemmer, “METHODS AND COMPOSITIONS FOR CELLULAR AND METABOLIC ENGINEERING” WO 97/35966; Punnonen et al. “TARGETING OF GENETIC VACCINE VECTORS” WO 99/41402; Punnonen et al. “ANTIGEN LIBRARY IMMUNIZATION” WO 99/41383; Punnonen et al. “GENETIC VACCINE VECTOR ENGINEERING” WO 99/41369; Punnonen et al. OPTIMIZATION OF IMMUNODULATORY PROPERTIES OF GENETIC VACCINES WO 9941368; Stemmer and Crameri, “DNA MUTAGENESIS BY RANDOM FRAGMENTATION AND REASSEMBLY” EP 0934999; Stemmer “EVOLVING CELLULAR DNA UPTAKE BY RECURSIVE SEQUENCE RECOMBINATION” EP 0932670; Stemmer et al., “MODIFICATION OF VIRUS TROPISM AND HOST RANGE BY VIRAL GENOME SHUFFLING” WO 9923107; Apt et al., “HUMAN PAPILLOMAVIRUS VECTORS” WO 9921979; Del Cardayre et al. “EVOLUTION OF WHOLE CELLS AND ORGANISMS BY RECURSIVE SEQUENCE RECOMBINATION” WO 9831837; Patten and Stemmer, “METHODS AND COMPOSITIONS FOR POLYPEPTIDE ENGINEERING” WO 9827230; Stemmer et al., and “METHODS FOR OPTIMIZATION OF GENE THERAPY BY RECURSIVE SEQUENCE SHUFFLING AND SELECTION” WO9813487.

[0138] Certain U.S. Applications provide additional details regarding DNA shuffling and related techniques, including “SHUFFLING OF CODON ALTERED GENES” by Patten et al. filed September 29, 1998, (U.S. Ser. No. 60/102,362), Jan. 29, 1999 (U.S. Ser. No. 60/117,729), and Sep. 28, 1999, U.S. Ser. No. 09/22588 (Attorney Docket Number 20-28520US/PCT); “EVOLUTION OF WHOLE CELLS AND ORGANISMS BY RECURSIVE SEQUENCE RECOMBINATION”, by del Cardyre et al. filed Jul. 15, 1998 (U.S. Ser. No. 09/166,188), and Jul. 15, 1999 (U.S. Ser. No. 09/354,922); “OLIGONUCLEOTIDE MEDIATED NUCLEIC ACID RECOMBINATION” by Crameri et al., filed Feb. 5, 1999 (U.S. Ser. No. 60/118,813) and filed Jun. 24, 1999 (U.S. Ser. No. 60/141,049) and filed Sep. 28, 1999 (U.S. Ser. No. 09/408,392, Attorney Docket Number 02-29620US); and “USE OF CODON-BASED OLIGONUCLEOTIDE SYNTHESIS FOR SYNTHETIC SHUFFLING” by Welch et al., filed Sep. 28, 1999 (U.S. Ser. No. 09/408,393, Attorney Docket Number 02-010070US); and “METHODS FOR MAKING CHARACTER STRINGS, POLYNUCLEOTIDES & POLYPEPTIDES HAVING DESIRED CHARACTERISTICS” by Selifonov and Stemmer, filed Feb. 5, 1999 (U.S. Ser. No. 60/118854, U.S. Ser. No. 09/416,375 and U.S. Ser. No. 09/494,282).

[0139] As review of the foregoing publications, patents, published applications and U.S. patent applications reveals, shuffling (or “recursive recombination”) of nucleic acids to provide new nucleic acids with desired properties can be carried out by a number of established methods. Any of these methods can be adapted to the present invention to evolve the triazine hydrolases discussed herein to produce new triazine hydrolases with improved properties. Both the methods of making such hydrolases and the hydrolases produced by these methods are a feature of the invention.

[0140] In brief, at least five different general classes of recombination methods are applicable to the present invention. First, nucleic acids can be recombined in vitro by any of a variety of techniques discussed in the references above, including e.g., DNAse digestion of nucleic acids to be recombined followed by ligation and/or PCR reassembly of the nucleic acids. Second, nucleic acids can be recursively recombined in vivo, e.g., by allowing recombination to occur between nucleic acids in cells. Third, whole cell genome recombination methods can be used in which whole genomes of cells are recombined, optionally including spiking of the genomic recombination mixtures with desired library components such as triazine hydrolase nucleic acids. Fourth, synthetic recombination methods can be used, in which oligonucleotides corresponding to different triazine hydrolases are synthesized and reassembled in PCR or ligation reactions which include oligonucleotides which correspond to more than one parental nucleic acid, thereby generating new recombined nucleic acids. Oligonucleotides can be made by standard nucleotide addition methods, or can be made by tri-nucleotide synthetic approaches. Fifth, in silico methods of recombination can be effected in which genetic algorithms are used in a computer to recombine sequence strings which correspond to triazine hydrolases such as those listed in the sequence listing herein. The resulting recombined sequence strings are optionally converted into nucleic acids by synthesis of nucleic acids which correspond to the recombined sequences, e.g., in concert with oligonucleotide synthesis/gene reassembly techniques. Any of the preceding general recombination formats are optionally practiced in a reiterative fashion to generate a more diverse set of recombinant nucleic acids.

[0141] The above references provide these and other basic recombination formats as well as many modifications of these formats. Regardless of the format that is used, the nucleic acids of the invention are optionally recombined (with each other or with related (or even unrelated) nucleic acids) to produce a diverse set of recombinant nucleic acids, including homologous nucleic acids. In general, the sequence recombination techniques described herein provide particular advantages in that they provide for recombination between the nucleic acids of SEQ ID NO:1 to SEQ ID NO:48 or derivatives thereof, in any available format, thereby providing a very fast way of exploring the manner in which different combinations of sequences can affect a desired result. For example, desired results for improved triazine hydrolases include, but are not limited to, the ability to hydrolyze a different substrate, e.g., with a different leaving group or different steric hindrance properties.

[0142] Following recombination, any nucleic acids which are produced can be selected for a desired activity. In the context of the present invention, this can include testing for and identifying triazine hydrolase activities, by any of the assays in the art. In addition, useful properties such as the ability to hydrolyze a variety of substrates with a variety of leaving groups can also be selected for. A variety of triazine hydrolase related (or even unrelated) properties are optionally assayed for, using any available assay.

[0143] A recombinant nucleic acid produced by recursively recombining one or more polynucleotides of the invention with one or more additional nucleic acid also forms a part of the invention. The one or more additional nucleic acid may include another polynucleotide of the invention; optionally, alternatively, or in addition, the one or more additional nucleic acid can include, e.g., a nucleic acid encoding a naturally-occurring triazine hydrolase or a subsequence thereof, any homologous triazine hydrolase sequence or subsequence thereof, or any triazine hydrolase sequence as found in GenBank or other available literature, or, e.g., any other homologous or non-homologous nucleic acid (certain recombination formats noted above, notably those performed synthetically or in silico, do not require homology for recombination).

[0144] The recombining steps may be performed in vivo, in vitro, or in silico as described in more detail in the references above. Also included in the invention is a cell containing any resulting recombinant nucleic acid, nucleic acid libraries produced by recursive recombination of the nucleic acids set forth herein, and populations of cells, vectors, viruses, plasmids or the like comprising the library or comprising any recombinant nucleic acid resulting from recombination (or recursive recombination) of a nucleic acid as set forth herein with another such nucleic acid, or an additional nucleic acid. Corresponding sequence strings in a database present in a computer system or computer readable medium are a feature of the invention.

[0145] Other Polynucleotide Compositions

[0146] The invention also includes compositions comprising two or more polynucleotides of the invention (e.g., as substrates for recombination). The composition can comprise a library of recombinant nucleic acids, where the library contains at least 2, 3, 5, 10, 20, or 50 or more nucleic acid species. The nucleic acids are optionally cloned into expression vectors, providing expression libraries.

[0147] The invention also includes compositions produced by digesting one or more polynucleotide of the invention with a restriction endonuclease, an RNAse, or a DNAse (e.g., as is performed in certain of the recombination formats noted above); and compositions produced by fragmenting or shearing one or more polynucleotide of the invention by mechanical means (e.g., sonication, vortexing, flow based fragmentation, and the like), which can also be used to provide substrates for recombination in the methods above. Similarly, compositions comprising sets of oligonucleotides corresponding to more than one nucleic acid of the invention are useful as recombination substrates and are a feature of the invention. For convenience, these fragmented, sheared, or oligonucleotide synthesized mixtures are referred to as fragmented nucleic acid sets.

[0148] Also included in the invention are compositions produced by incubating one or more of the fragmented nucleic acid sets in the presence of ribonucleotide- or deoxyribonucleotide triphosphates and a nucleic acid polymerase. This resulting composition forms a recombination mixture for many of the recombination formats noted above. The nucleic acid polymerase may be an RNA polymerase, a DNA polymerase, or an RNA-directed DNA polymerase (e.g., a “reverse transcriptase”); the polymerase can be, e.g., a thermostable DNA polymerase (such as, VENT, TAQ, or the like).

[0149] Triazine Hydrolase Polypeptides

[0150] The invention provides isolated or recombinant triazine hydrolase polypeptides, referred to herein as “triazine hydrolase polypeptides” or simply “triazine hydrolases.” An isolated or recombinant triazine hydrolase polypeptide of the invention includes a polypeptide comprising a sequence selected from SEQ ID NO:49 to SEQ ID NO:608 and conservatively modified variants thereof.

[0151] Several conclusions may be drawn from comparison of the exemplary sequences of the invention to sequences of known, naturally-occurring triazine hydrolases, such as atrazine chlorohydrolase U55933. Such sequences are readily available from a variety of sources, such as GenBank, and the Pfam (Protein Families) database at http://www.sanger.ac.uk/Software/Pfam/index.shtml

[0152] Of particular note is the presence of differing amino acids in some triazine hydrolase polypeptide sequences of the invention at the following positions: 84, 92, 125, 217, 219, 253, 255, 328, and 331 (corresponding to nucleic acid positions 250, 274, 375, 650, 655, 757, 763, 982, and 991). In other words, amino acid residues in these positions are typically different in the improved hydrolases of the invention as compared to the equivalent position of known, naturally-occurring or recombinant triazine hydrolase sequences, i.e., U55933. The triazine hydrolases of the present invention with variations at these positions exhibit improved activity as compared with atrazine chlorohydrolase U55933 or activity against a novel or alternative substrate. Other unique (as compared to U55933) amino acid residues present in some of the polypeptides of the invention correspond to amino acid positions 30, 160, 386, and 465 (nucleic acid positions 89, 478, 1157, and 1395). All numbering is in relation to the nucleic acid of SEQ ID NO: 1 or the amino acid sequence of SEQ ID NO: 49.

[0153] The invention includes a triazine hydrolase polypeptide comprising at least about 20 or at least about 50 contiguous amino acids of any one of SEQ ID NO:49-608, and one or more amino acid at position 84, 92, 125, 217, 219, 253, 255, 328, and 331 that is unique as compared to U55933 or AF312304, wherein the numbering of the amino acids corresponds to that of SEQ ID NO:49.

[0154] In other embodiments, the invention includes a triazine hydrolase polypeptide that is at least about 70% homologous to SEQ ID NO: 49, wherein position number 84 comprises leucine or phenylalanine, position number 92 comprises a leucine, valine or alanine residue, position number 125 comprises glutamic acid, position number 217 comprises threonine, position number 219 comprises threonine, position number 253 comprises leucine or isoleucine, position number 255 comprises glycine or tryptophan, position number 328 comprises aspartic acid or asparagine, and position number 331 comprises serine or cysteine and wherein the polypeptide is unique as compared to atrazine chlorohydrolase (atzA, U55933) or triazine hydrolase (AF312304).

[0155] For example, preferred polypeptides of the present invention include, but are not limited to, modified versions of atzA (U55933) or AF312304, wherein the modified sequences comprise one or more modification selected from: L₈₄, L₉₂, D₁₂₅, I₂₁₇, P₂₁₉, L₂₅₃, W₂₅₅, D₃₂₈, and C₃₃₁. All numbering corresponds to SEQ ID NO: 49. These polypeptides typically comprise a triazine hydrolase activity, such as activity toward atrazine, atratone, or the like. Example modifications include, the following:

L₉₂, E₁₂₅, T₂₁₇, P₂₁₉, L₂₅₃, W₂₅₅, and S₃₃₁;
L₉₂, E₁₂₅, T₂₁₇, P₂₁₉, L₂₅₃, G₂₅₅, and S₃₃₁;
V₉₂, E₁₂₅, T₂₁₇, P₂₁₉, L₂₅₃, W₂₅₅, and S₃₃₁;
V₉₂, E₁₂₅, T₂₁₇, P₂₁₉, L₂₅₃, G₂₅₅, and S₃₃₁;
L₉₂, E₁₂₅, T₂₁₇, P₂₁₉, L₂₅₃, W₂₅₅, and S₃₃₁;
L₉₂, E₁₂₅, T₂₁₇, P₂₁₉, L₂₅₃, G₂₅₅, and S₃₃₁;
V₉₂, E₁₂₅, I₂₁₇, P₂₁₉, L₂₅₃, W₂₅₅, and S₃₃₁;
V₉₂, E₁₂₅, I₂₁₇, P₂₁₉, L₂₅₃, G₂₅₅, and S₃₃₁;
L₉₂, D₁₂₅, T₂₁₇, P₂₁₉, L₂₅₃, G₂₅₅, and S₃₃₁;
V₉₂, E₁₂₅, T₂₁₇, P₂₁₉, L₂₅₃, W₂₅₅, and C₃₃₁;
V₉₂, E₁₂₅, T₂₁₇, P₂₁₉, L₂₅₃, G₂₅₅, and C₃₃₁;
V₉₂, E₁₂₅, T₂₁₇, P₂₁₉, L₂₅₃, W₂₅₅, and S₃₃₁;
L₉₂, E₁₂₅, T₂₁₇, T₂₁₉, L₂₅₃, W₂₅₅, and S₃₃₁;
V₉₂, E₁₂₅, T₂₁₇, P₂ₗ₉, L₂₅₃, G₂₅₅, and S₃₃₁;
L₉₂, E₁₂₅, T₂₁₇, T₂₁₉, L₂₅₃, G₂₅₅, and S₃₃₁;
V₉₂, D₁₂₅, T₂₁₇, P₂₁₉, L₂₅₃, W₂₅₅, and S₃₃₁;
V₉₂, D₁₂₅, T₂₁₇, P₂₁₉, L₂₅₃, G₂₅₅, and S₃₃₁;
V₉₂, E₁₂₅, T₂₁₇, T₂₁₉, L₂₅₃, W₂₅₅, and S₃₃₁;
V₉₂, E₁₂₅, T₂₁₇, T₂₁₉, L₂₅₃, G₂₅₅, and S₃₃₁;
F₈₄, L₉₂, E₁₂₅, L₂₅₃, G₂₅₅, D₃₂₈, and C₃₃₁;
F₈₄, L₉₂, E₁₂₅, I₂₅₃, G₂₅₅, D₃₂₈, and C₃₃₁;
F₈₄, L₉₂, E₁₂₅, L₂₅₃, W₂₅₅, D₃₂₈, and C₃₃₁;
F₈₄, L₉₂, E₁₂₅, I₂₅₃, W₂₅₅, D₃₂₈, and C₃₃₁;
L₈₄, L₉₂, E₁₂₅, L₂₅₃, G₂₅₅, D₃₂₈, and C₃₃₁;
L₈₄, L₉₂, E₁₂₅, I₂₅₃, G₂₅₅, D₃₂₈, and C₃₃₁;
F₈₄, L₉₂, D₁₂₅, L₂₅₃, G₂₅₅, D₃₂₈, and C₃₃₁;
F₈₄, L₉₂, D₁₂₅, I₂₅₃, G₂₅₅, D₃₂₈, and C₃₃₁;
L₈₄, L₉₂, E₁₂₅, L₂₅₃, W₂₅₅, D₃₂₈, and C₃₃₁;
L₈₄, L₉₂, E₁₂₅, I₂₅₃, W₂₅₅, D₃₂₈, and C₃₃₁;
F₈₄, L₉₂, D₁₂₅, L₂₅₃, W₂₅₅, D₃₂₈, and C₃₃₁;
F₈₄, L₉₂, D₁₂₅, I₅₃, W2₅₅, D₃₂₈, and C₃₃₁;
L₈₄, L₉₂, D₁₂₅, L₂₅₃, G₂₅₅, D₃₂₈, and C₃₃₁;
L₈₄, L₉₂, D₁₂₅, L₂₅₃, G₂₅₅, D₃₂₈, and C₃₃₁;
L₈₄, L₉₂, D₁₂₅, L₂₅₃, W₂₅₅, D₃₂₈, and C₃₃₁; and,
L₈₄, L₉₂, D₁₂₅, L₂₅₃, W₂₅₅, D₃₂₈, and C₃₃₁.

[0156] Preferred polypeptide sequences showing novel triazine hydrolase activity include, but are not limited to, the following polypeptides represented in Table 5. In Table 5, library members 128, 124, 256, and 252 are preferred atrazine hydrolases. Preferred hydrolases for activity toward atratone include library members 121, 113, 125, 117, 377, 369, 57, 49, 381, 373, 61, 53, 313, 305, 317, and 309. Preferred ametryn hydrolases include library members 378, 377, 382, 314, 381, 313, 379, 383, 370, 121, 318, 317, 369, 125, and 374. Preferred hydrolases having activity toward amino-atrazine include, but are not limited to, library members 309, 373, 317, 381, 305, 369, 313, and 377. Preferred prometryn hydrolases, include, but are not limited to, library members 498, 502, 506, 482, 497, 510, 501, 505, and 466. Library members 252, 244, 508, 256, 500, 248, 512, and 504 comprise preferred hydrolases for propazine substrates and library members 505, 509, 507, 506, 497, 249, and 441 are preferred for activity against amino-propazine. NME-propazine activity is represented by preferred library members 477, 473, 509, 505, 469, 465, 501, 506, and 510 in Table 5 and preferred NME-atrazine hydrolases include library members 377, 381, 505, 369, 509, 373, 121, 313, 125, 345, 317, and 349. The substrate activity column in Table 5 indicates preferred embodiments and is not exclusive.

[0157] Other modifications are exemplified by those sequences corresponding to SEQ ID NOs: 97-608. Polynucleotides that are at least about 70% identical to SEQ ID NO: 1 with the corresponding changes are also included in the present invention.

[0158] Making Polypeptides

[0159] Recombinant methods for producing and isolating triazine hydrolase polypeptides of the invention are described above. In addition to recombinant production, the polypeptides may be produced by direct peptide synthesis using solid-phase techniques (cf Stewart et al. (1969) Solid-Phase Peptide Synthesis, WH Freeman Co, San Francisco; Merrifield J (1963) J. Am. Chem. Soc. 85:2149-2154). Peptide synthesis may be performed using manual techniques or by automation. Automated synthesis may be achieved, for example, using Applied Biosystems 431A Peptide Synthesizer (Perkin Elmer, Foster City, Calif.) in accordance with the instructions provided by the manufacturer. For example, subsequences may be chemically synthesized separately and combined using chemical methods to provide full-length triazine hydrolases.

[0160] Using Polypeptides

[0161] Antibodies

[0162] In another aspect of the invention, a triazine hydrolase polypeptide of the invention is used to produce antibodies which have, e.g., diagnostic and therapeutic uses, e.g., related to the activity, distribution, and expression of triazine hydrolases.

[0163] Antibodies to triazine hydrolases of the invention may be generated by methods well known in the art. Such antibodies may include, but are not limited to, polyclonal, monoclonal, chimeric, humanized, single chain, Fab fragments and fragments produced by an Fab expression library. Antibodies, i.e., those which block receptor binding, are especially preferred for therapeutic use.

[0164] Triazine hydrolase polypeptides for antibody induction do not require biological activity; however, the polypeptide or oligopeptide must be antigenic. Peptides used to induce specific antibodies may have an amino acid sequence consisting of at least 10 amino acids, preferably at least 15 or 20 amino acids. Short stretches of a triazine hydrolase polypeptide may be fused with another protein, such as keyhole limpet hemocyanin, and antibody produced against the chimeric molecule.

[0165] Methods of producing polyclonal and monoclonal antibodies are known to those of skill in the art, and many antibodies are available. See, e.g., Coligan (1991) Current Protocols in Immunology Wiley/Greene, NY; and Harlow and Lane (1989) Antibodies: A Laboratory Manual Cold Spring Harbor Press, NY; Stites et al. (eds.) Basic and Clinical Immunology (4th ed.) Lange Medical Publications, Los Altos, Calif., and references cited therein; Goding (1986) Monoclonal Antibodies: Principles and Practice (2d ed.) Academic Press, New York, N.Y.; and Kohler and Milstein (1975) Nature 256: 495-497. Other suitable techniques for antibody preparation include selection of libraries of recombinant antibodies in phage or similar vectors. See, Huse et al. (1989) Science 246: 1275-1281; and Ward, et al. (1989) Nature 341: 544-546. Specific monoclonal and polyclonal antibodies and antisera will usually bind with a K_{D} of at least about 0.1 μM, preferably at least about 0.01 μM or better, and most typically and preferably, 0.001 μM or better.

[0166] Detailed methods for preparation of chimeric (humanized) antibodies can be found in U.S. Pat. No. 5,482,856. Additional details on humanization and other antibody production and engineering techniques can be found in Borrebaeck (ed) (1995) Antibody Engineering, 2^{nd} Edition Freeman and Company, NY (Borrebaeck); McCafferty et al. (1996) Antibody Engineering, A Practical Approach IRL at Oxford Press, Oxford, England (McCafferty), and Paul (1995) Antibody Engineering Protocols Humana Press, Towata, N.J. (Paul).

[0167] Sequence Variations

[0168] Conservatively Modified Variations

[0169] Triazine hydrolase polypeptides of the present invention include conservatively modified variations of the sequences disclosed herein as SEQ ID NO:49 to SEQ ID NO:608. Such conservatively modified variations comprise substitutions, additions or deletions which alter, add or delete a single amino acid or a small percentage of amino acids (typically less than about 5%, more typically less than about 4%, 2%, or 1%) in any of SEQ ID NO:49 to SEQ ID NO:608.

[0170] For example, a conservatively modified variation (e.g., deletion) of the 474 amino acid polypeptide identified herein as SEQ ID NO:49 will have a length of at least about 450 amino acids, preferably at least about 455 amino acids, more preferably at least about 465 amino acids, and still more preferably at least about 470 amino acids, corresponding to a deletion of less than about 5%, 4%, 2% or 1% of the polypeptide sequence.

[0171] Another example of a conservatively modified variation (e.g., a “conservatively substituted variation”) of the polypeptide identified herein as SEQ ID NO:49 will contain “conservative substitutions”, according to the six substitution groups set forth in Table 2 (supra), in up to about 23 residues (i.e., less than about 5%) of the 474 amino acid polypeptide.

[0172] The triazine hydrolase polypeptide sequences of the invention, including conservatively substituted sequences, can be present as part of larger polypeptide sequences such as occur upon the addition of one or more domains for purification of the protein (e.g., poly his segments, FLAG tag segments, etc.), e.g., where the additional functional domains have little or no effect on the activity of the triazine hydrolase portion of the protein, or where the additional domains can be removed by post synthesis processing steps such as by treatment with a protease.

[0173] In various embodiments, the polypeptides of the invention comprise at least about 30, or at least about 50, at least about 70, at least about 100, at least about 120, at least about 150, or at least about 155 contiguous amino acid residues of any one of SEQ ID NO:49-608.

[0174] Defining Polypeptides by Immunoreactivity

[0175] Because the polypeptides of the invention provide a variety of new polypeptide sequences as compared to other triazine hydrolases, the polypeptides also provide new structural features which can be recognized, e.g., in immunological assays. The generation of antisera which specifically binds the polypeptides of the invention, as well as the polypeptides which are bound by such antisera, are a feature of the invention.

[0176] The invention includes triazine hydrolase proteins that specifically bind to or that are specifically immunoreactive with an antibody or antisera generated against an immunogen comprising an amino acid sequence selected from one or more of SEQ ID NO: SEQ ID NO: 49 to SEQ ID NO: 608. To eliminate cross-reactivity with other triazine hydrolases, the antibody or antisera is subtracted with available triazine hydrolases, such as that represented at GenBank accession numbers U55933 (a control triazine hydrolase nucleic acid). Where the accession number corresponds to a nucleic acid, a polypeptide encoded by the nucleic acid is generated and used for antibody/antisera subtraction purposes. Where the nucleic acid corresponds to a non-coding sequence, e.g., a pseudo gene, an amino acid which corresponds to the reading frame of the nucleic acid is generated (e.g., synthetically), or is minimally modified to include a start codon for recombinant production.

[0177] In one typical format, the immunoassay uses a polyclonal antiserum which was raised against one or more polypeptide comprising one or more of the sequences corresponding to one or more of: SEQ ID NO:49 to SEQ ID NO: 608 or a substantial subsequence thereof (i.e., at least about 30% of the full length sequence provided). The full set of potential polypeptide immunogens derived from SEQ ID NO:49 to SEQ ID NO: 608 are collectively referred to below as “the immunogenic polypeptides.” The resulting antisera is optionally selected to have low cross-reactivity against the control triazine hydrolases other known triazine hydrolases and any such cross-reactivity is removed by immunoabsorbtion with one or more of the control triazine hydrolases, such as atrazine chlorohydrolase, prior to use of the polyclonal antiserum in the immunoassay.

[0178] In order to produce antisera for use in an immunoassay, one or more of the immunogenic polypeptides is produced and purified as described herein. For example, recombinant protein may be produced in a mammalian cell line. An inbred strain of mice (used in this assay because results are more reproducible due to the virtual genetic identity of the mice) is immunized with the immunogenic protein(s) in combination with a standard adjuvant, such as Freund's adjuvant, and a standard mouse immunization protocol (see, Harlow and Lane (1988) Antibodies, A Laboratory Manual, Cold Spring Harbor Publications, New York, for a standard description of antibody generation, immunoassay formats and conditions that can be used to determine specific immunoreactivity). Alternatively, one or more synthetic or recombinant polypeptide derived from the sequences disclosed herein is conjugated to a carrier protein and used as an immunogen.

[0179] Polyclonal sera are collected and titered against the immunogenic polypeptide in an immunoassay, for example, a solid phase immunoassay with one or more of the immunogenic proteins immobilized on a solid support. Polyclonal antisera with a titer of 10⁶ or greater are selected, pooled and subtracted with the control triazine hydrolase polypeptides to produce subtracted pooled titered polyclonal antisera.

[0180] The subtracted pooled titered polyclonal antisera are tested for cross reactivity against the control triazine hydrolases. Preferably at least two of the immunogenic triazine hydrolases are used in this determination, preferably in conjunction with at least two control hydrolase homologues, to identify antibodies which are specifically bound by the immunogenic protein(s).

[0181] In this comparative assay, discriminatory binding conditions are determined for the subtracted titered polyclonal antisera which result in at least about a 5-10 fold higher signal to noise ratio for binding of the titered polyclonal antisera to the immunogenic triazine hydrolases as compared to binding to the control triazine hydrolases. That is, the stringency of the binding reaction is adjusted by the addition of non-specific competitors such as albumin or non-fat dry milk, or by adjusting salt conditions, temperature, or the like. These binding conditions are used in subsequent assays for determining whether a test polypeptide is specifically bound by the pooled subtracted polyclonal antisera. In particular, test polypeptides which show at least a 2-5× higher signal to noise ratio than the control polypeptides under discriminatory binding conditions, and at least about a one half signal to noise ratio as compared to the immunogenic polypeptide(s), shares substantial structural similarity with the immunogenic polypeptide as compared to known triazine hydrolases, and is, therefore a polypeptide of the invention.

[0182] In another example, immunoassays in the competitive binding format are used for detection of a test polypeptide. For example, as noted, cross-reacting antibodies are removed from the pooled antisera mixture by immunoabsorbtion with the control triazine hydrolase polypeptides. The immunogenic polypeptide(s) are then immobilized to a solid support which is exposed to the subtracted pooled antisera. Test proteins are added to the assay to compete for binding to the pooled subtracted antisera. The ability of the test protein(s) to compete for binding to the pooled subtracted antisera as compared to the immobilized protein(s) is compared to the ability of the immunogenic polypeptide(s) added to the assay to compete for binding (the immunogenic polypeptides compete effectively with the immobilized immunogenic polypeptides for binding to the pooled antisera). The percent cross-reactivity for the test proteins is calculated, using standard calculations.

[0183] In a parallel assay, the ability of the control proteins to compete for binding to the pooled subtracted antisera is determined as compared to the ability of the immunogenic polypeptide(s) to compete for binding to the antisera. Again, the percent cross-reactivity for the control polypeptides is calculated, using standard calculations. Where the percent cross-reactivity is at least 5-10× as high for the test polypeptides, the test polypeptides are said to specifically bind the pooled subtracted antisera.

[0184] In general, the immunoabsorbed and pooled antisera can be used in a competitive binding immunoassay as described herein to compare any test polypeptide to the immunogenic polypeptide(s). In order to make this comparison, the two polypeptides are each assayed at a wide range of concentrations and the amount of each polypeptide required to inhibit 50% of the binding of the subtracted antisera to the immobilized protein is determined using standard techniques. If the amount of the test polypeptide required is less than twice the amount of the immunogenic polypeptide that is required, then the test polypeptide is said to specifically bind to an antibody generated to the immunogenic protein, provided the amount is at least about 5-10× as high as for a control polypeptide.

[0185] As a final determination of specificity, the pooled antisera is optionally fully immunabsorbed with the immunogenic polypeptide(s) (rather than the control polypeptides) until little or no binding of the resulting immunogenic polypeptide subtracted pooled antisera to the immunogenic polypeptide(s) used in the immunoabsorbtion is detectable. This fully immunosorbed antisera is then tested for reactivity with the test polypeptide. If little or no reactivity is observed (i.e., no more than 2× the signal to noise ratio observed for binding of the fully immunoabsorbed antisera to the immunogenic polypeptide), then the test polypeptide is specifically bound by the antisera elicited by the immunogenic protein.

[0186] Degradation of Triazine Compounds with Triazine Hydrolases

[0187] Due to their activity against triazine derivatives, the triazine hydrolases of the invention are optionally used in compositions (in vivo or in vitro) to serve as decontamination or cleaning solutions for water or soil contaminated with atrazine or another triazine derivative, such as aminotriazine, atrazine, atratone, N-methylatrazine, ametryn, aminopropazine, propazine, prometon, N-methylpropazine, prometryn, aminomorphazine, morphazine, morphatryn, morphaton, or N-methylmorphazine, or the like (as described above).

[0188] The polypeptides presented herein provide hydrolases that degrade novel substrates in comparison to wild-type atrazine chlorohydrolase. For example, the hydrolases of the invention are optionally used to remove alternate leaving groups from triazine derivatives. For example, NH₂, Cl or other halogens, O—CH₃, —NHCH₃, —SCH₃, or the like are optionally removed from a triazine derivative by one or more of the hydrolases provided herein. In addition, substrates with greater or lesser steric hindrance are also degraded by one or more the hydrolases provided herein. Examples of substrate compounds are provided as follows:

[chemical structure]

[0189] wherein R₁ and R₃ each independently comprise an amino group, i.e., —NH₂, or a substituted linear, branched, or cyclic amino group. Typically R₁ and R₃ are each independently a lower-alkyl-substituted amino group or a morpholino group. As used herein, the term “lower alkyl” refers to a C₁₋₆ alkyl. More typically, R₁ and R₃ are each independently —NH(C₂H₅), —NHCH(CH₃)₂,

[chemical structure]

[0190] or the like. Preferably, R₃ is —NHCH(CH₃)₂, R₂ is an amino group, i.e., —NH₂, or an optionally substituted amino group, e.g., —NRH or —NRR′, a halo, a lower alkoxy, or —S—R, where R and R′ are each independently a lower alkyl group. Typically R₂ is —NH₂, —X, wherein X is a halogen such as Cl, —OCH₃, —NH(CH₃), or —S—CH₃. A larger R₁ and/or R₃ group leads to greater steric hindrance. Tables 3 and 4 provide data illustrating the use of the novel polypeptides of the invention against substrates that cannot be degraded by other triazine hydrolases including substrates such as ametryn, N-methylatrazine, prometryn, N-methylpropazine, prometon, and the like.

[0191] The present invention provides for the use of the novel triazine hydrolases of the invention in decontamination solutions, as well as such compositions containing the mutant hydrolase enzymes. Such solutions in principle have any physical form, e.g., tablets, solutions, cell cultures, etc. For example, cells transformed with the recombinant genes for triazine hydrolases provided herein are used to express the hydrolases. The cells are mixed with soil or water for decontamination where the expressed enzyme degrades or hydrolyzes the triazine derivative, thus purifying the soil or water sample.

[0192] Integrated Systems

[0193] The present invention provides computers, computer readable media and integrated systems comprising character strings corresponding to the sequence information herein for the polypeptides and nucleic acids herein, including, e.g., those sequences listed herein and the various silent substitutions and conservative substitutions thereof.

[0194] Various methods and genetic algorithms (GOs) known in the art can be used to detect homology or similarity between different character strings, or can be used to perform other desirable functions such as to control output files, provide the basis for making presentations of information including the sequences and the like. Examples include BLAST, discussed supra.

[0195] Thus, different types of homology and similarity of various stringency and length can be detected and recognized in the integrated systems herein. For example, many homology determination methods have been designed for comparative analysis of sequences of biopolymers, for spell-checking in word processing, and for data retrieval from various databases. With an understanding of double-helix pair-wise complement interactions among 4 principal nucleobases in natural polynucleotides, models that simulate annealing of complementary homologous polynucleotide strings can also be used as a foundation of sequence alignment or other operations typically performed on the character strings corresponding to the sequences herein (e.g., word-processing manipulations, construction of figures comprising sequence or subsequence character strings, output tables, etc.). An example of a software package with GOs for calculating sequence similarity is BLAST, which can be adapted to the present invention by inputting character strings corresponding to the sequences herein.

[0196] Similarly, standard desktop applications such as word processing software (e.g., Microsoft Word™ or Corel WordPerfect™) and database software (e.g., spreadsheet software such as Microsoft Excel™, Corel Quattro Pro™, or database programs such as Microsoft Access™ or Paradox™) can be adapted to the present invention by inputting a character string corresponding to the triazine hydrolases of the invention (either nucleic acids or proteins, or both). For example, the integrated systems can include the foregoing software having the appropriate character string information, e.g., used in conjunction with a user interface (e.g., a GUI in a standard operating system such as a Windows, Macintosh or LINUX system) to manipulate strings of characters. As noted, specialized alignment programs such as BLAST can also be incorporated into the systems of the invention for alignment of nucleic acids or proteins (or corresponding character strings).

[0197] Integrated systems for analysis in the present invention typically include a digital computer with GO software for aligning sequences, as well as data sets entered into the software system comprising any of the sequences herein. The computer can be, e.g., a PC (Intel x86 or Pentium chip-compatible DOS™, OS2™ WINDOWS™ WINDOWS NT™, WINDOWS95™, WINDOWS98™ LINUX based machine, a MACINTOSH™, Power PC, or a UNIX based (e.g., SUN™ work station) machine) or other commercially common computer which is known to one of skill. Software for aligning or otherwise manipulating sequences is available, or can easily be constructed by one of skill using a standard programming language such as Visualbasic, Fortran, Basic, Java, or the like.

[0198] Any controller or computer optionally includes a monitor which is often a cathode ray tube (“CRT”) display, a flat panel display (e.g., active matrix liquid crystal display, liquid crystal display), or others. Computer circuitry is often placed in a box which includes numerous integrated circuit chips, such as a microprocessor, memory, interface circuits, and others. The box also optionally includes a hard disk drive, a floppy disk drive, a high capacity removable drive such as a writeable CD-ROM, and other common peripheral elements. Inputting devices such as a keyboard or mouse optionally provide for input from a user and for user selection of sequences to be compared or otherwise manipulated in the relevant computer system.

[0199] The computer typically includes appropriate software for receiving user instructions, either in the form of user input into a set parameter fields, e.g., in a GUI, or in the form of preprogrammed instructions, e.g., preprogrammed for a variety of different specific operations. The software then converts these instructions to appropriate language for instructing the operation of the fluid direction and transport controller to carry out the desired operation.

[0200] The software can also include output elements for controlling nucleic acid synthesis (e.g., based upon a sequence or an alignment of a sequences herein) or other operations which occur downstream from an alignment or other operation performed using a character string corresponding to a sequence herein.

[0201] In an additional aspect, the present invention provides kits embodying the methods, composition, systems and apparatus herein. Kits of the invention optionally comprise one or more of the following: (1) an apparatus, system, system component or apparatus component as described herein; (2) instructions for practicing the methods described herein, and/or for operating the apparatus or apparatus components herein and/or for using the compositions herein; (3) one or more triazine hydrolase composition or component; (4) a container for holding components or compositions, and, (5) packaging materials.

[0202] In a further aspect, the present invention provides for the use of any apparatus, apparatus component, composition or kit herein, for the practice of any method or assay herein, and/or for the use of any apparatus or kit to practice any assay or method herein.

[0203] While the foregoing invention has been described in some detail for purposes of clarity and understanding, it will be clear to one skilled in the art from a reading of this disclosure that various changes in form and detail can be made without departing from the true scope of the invention. For example, all the techniques and apparatus described above may be used in various combinations. All publications, patents, patent applications, or other documents cited in this application are incorporated by reference in their entirety for all purposes to the same extent as if each individual publication, patent, patent application, or other document were individually indicated to be incorporated by reference for all purposes.

### Table 3

[0204] Product Formation in nM/h Using Following Reaction Conditions:

[0205] 20 ul washed and induced cells OD600=3 in a total volume of 100 μl 10 mM

[0206] NH₃Acetate pH 6.8, 250 μM substrate, incubation at 22° C.

TABLE 3
Product formation in nM/h using following reaction conditions:
20 ul washed and induced cells OD600 = in a total volume of
100 μl 10 nM
NH₃Acetate pH 6.8, 250 μM substrate, incubation at 22° C.

| | substrate | Atrazine | Atratone | Ametryn | NMeAtrazine | Aminoatrazine |
|---|---|---|---|---|---|---|
| nc | | 0 | 0 | 0 | 0 | 0 |
| atzA | | 58899 | 0 | 0 | 0 | 0 |
| Hit 1 | 1D.7 G8 | 13800 | 12364 | 1717 | 2198 | 190877 |
| Hit 2 | 1U.3 A7 | 16381 | 14586 | 2489 | 3830 | 262994 |
| Hit 3 | 1D.1 D2 | 21585 | 23685 | 667 | 762 | 118358 |
| Hit 4 | 1D.1 C10 | 20654 | 18738 | 420 | 1273 | 224186 |
| Hit 5 | 1D.10 A7 | 15715 | 12744 | 2035 | 1755 | 136259 |
| Hit 6 | 1U.3 F12 | 8639 | 7752 | 638 | 2080 | 143177 |
| Hit 7 | 1U.5 H8 | 4474 | 4685 | 348 | 2106 | 88757 |
| Hit 8 | 1D.1 C3 | 80746 | 0 | 0 | 0 | 0 |
| Hit 9 | 1D.5 H6 | 29313 | 0 | 0 | 0 | 0 |

### Table 4

[0207] Product Formation in nM/h Using Following Reaction Conditions:

[0208] 20 ul washed and induced cells OD600=3 in a total volume of 100 μl 10 mM

[0209] NH₃Acetate pH 6.8, 250 μM substrate, incubation at 37° C.

Product formation in nM/h using following reaction conditions:
20 ul washed and induced cells OD600 = 3 in a total volume of
100 μl 10 mM
NH₃Acetate pH 6.8, 250 μM substrate, incubation at 37° C.

| | substrate | Propazine | Prometon | Prometryn | NMePropazine | Aminopropazine |
|---|---|---|---|---|---|---|
| nc | | 0 | 0 | 0 | 0 | 0 |
| atzA | | 26 | 0 | 0 | 0 | 0 |
| Hit 1 | 1D.7 G8 | 0 | 434 | 0 | 0 | 33355 |
| Hit 2 | 1U.3 A7 | 0 | 892 | 0 | 23 | 46018 |
| Hit 3 | 1D.1 D2 | 0 | 49 | 0 | 0 | 1312 |
| Hit 4 | 1D.1 C10 | 0 | 746 | 16 | 19 | 11322 |
| Hit 5 | 1D.10 A7 | 0 | 818 | 0 | 18 | 13951 |
| Hit 6 | 1U.3 F12 | 56 | 2888 | 301 | 1453 | 20856 |
| Hit 7 | 1U.5 H8 | 0 | 1423 | 27 | 180 | 29753 |
| Hit 8 | 1D.1 C3 | 16 | 0 | 0 | 0 | 0 |
| Hit 9 | 1D.5 H6 | 72 | 0 | 0 | 0 | 0 |

[0210] TABLE 5

| | LIBRARY | | | | | | | | | | |
|---|---|---|---|---|---|---|---|---|---|---|---|
| | MEMBER | | | | | | | | | | Substrate |
| SEQ. ID NO. | NO. | 84 | 92 | 125 | 217 | 219 | 253 | 255 | 328 | 331 | Activity |
| Seq ID NO 97 | 1 | F | L | D | I | P | I | G | D | C | |
| Seq ID NO 98 | 2 | F | L | D | I | P | I | G | D | S | |
| Seq ID NO 99 | 3 | F | L | D | I | P | I | G | N | C | |
| Seq ID NO. 100 | 4 | F | L | D | I | P | I | G | N | S | |
| Seq ID NO 101 | 5 | F | L | D | I | P | I | W | D | C | |
| Seq ID NO 102 | 6 | F | L | D | I | P | I | W | D | S | |
| Seq ID NO 103 | 7 | F | L | D | I | P | I | W | N | C | |
| Seq ID NO 104 | 8 | F | L | D | I | P | I | W | N | S | |
| Seq ID NO 105 | 9 | F | L | D | I | P | L | G | D | C | |
| Seq ID NO 106 | 10 | F | L | D | I | P | L | G | D | S | |
| Seq ID NO 107 | 11 | F | L | D | I | P | L | G | N | C | |
| Seq IO NO 108 | 12 | F | L | D | I | P | L | G | N | S | |
| Seq ID NO 109 | 13 | F | L | D | I | P | L | W | D | C | |
| Seq ID NO 110 | 14 | F | L | D | I | P | L | W | D | S | |
| Seq ID NO 111 | 15 | F | L | D | I | P | L | W | N | C | |
| Seq ID NO 112 | 16 | F | L | D | I | P | L | W | N | S | |
| Seq ID NO 113 | 17 | F | L | D | I | T | I | G | D | C | |
| Seq ID NO 114 | 18 | F | L | D | I | T | I | G | D | S | |
| Seq ID NO 115 | 19 | F | L | D | I | T | I | G | N | C | |
| Seq ID NO 116 | 20 | F | L | D | I | T | I | G | N | S | |
| Seq ID NO 117 | 21 | F | L | D | I | T | I | W | D | C | |
| Seq ID NO 118 | 22 | F | L | D | I | T | I | W | D | S | |
| Seq ID NO 119 | 23 | F | L | D | I | T | I | W | N | C | |
| Seq ID NO 120 | 24 | F | L | D | I | T | I | W | N | S | |
| Seq ID NO 121 | 25 | F | L | D | I | T | L | G | D | C | |
| Seq ID NO 122 | 26 | F | L | D | I | T | L | G | D | S | |
| Seq ID NO 123 | 27 | F | L | D | I | T | L | G | N | C | |
| Seq ID NO 124 | 28 | F | L | D | I | T | L | G | N | S | |
| Seq ID NO 125 | 29 | F | L | D | I | T | L | W | D | C | |
| Seq ID NO 126 | 30 | F | L | D | I | T | L | W | D | S | |
| Seq ID NO 127 | 31 | F | L | D | I | T | L | W | N | C | |
| Seq ID NO. 128 | 32 | F | L | D | I | T | L | W | N | S | |
| Seq ID NO. 129 | 33 | F | L | D | T | P | I | G | D | C | |
| Seq ID NO 130 | 34 | F | L | D | T | P | I | G | D | S | |
| Seq ID NO 131 | 35 | F | L | D | T | P | I | G | N | C | |
| Seq ID NO 132 | 36 | F | L | D | T | P | I | G | N | S | |
| Seq ID NO 133 | 37 | F | L | D | T | P | I | W | D | C | |
| Seq ID NO 134 | 38 | F | L | D | T | P | I | W | D | S | |
| Seq ID NO 135 | 39 | F | L | D | T | P | I | W | N | C | |
| Seq ID NO 136 | 40 | F | L | D | T | P | I | W | N | S | |
| Seq ID NO 137 | 41 | F | L | D | T | P | L | G | D | C | |
| Seq ID NO 138 | 42 | F | L | D | T | P | L | G | D | S | |
| Seq ID NO. 139 | 43 | F | L | D | T | P | L | G | N | C | |
| Seq ID NO 140 | 44 | F | L | D | T | P | L | G | N | S | |
| Seq ID NO 141 | 45 | F | L | D | T | P | L | W | D | C | |
| Seq ID NO 142 | 46 | F | L | D | T | P | L | W | D | S | |
| Seq ID NO 143 | 47 | F | L | D | T | P | L | W | N | C | |
| Seq ID NO 144 | 48 | F | L | D | T | P | L | W | N | S | |
| Seq ID NO 145 | 49 | F | L | D | T | T | I | G | D | C | atratone |
| Seq ID NO 146 | 50 | F | L | D | T | T | I | G | D | S | |
| Seq ID NO 147 | 51 | F | L | D | T | T | I | G | N | C | |
| Seq ID NO 148 | 52 | F | L | D | T | T | I | G | N | S | |
| Seq ID NO 149 | 53 | F | L | D | T | T | I | W | D | C | atratone |
| Seq ID NO 150 | 54 | F | L | D | T | T | I | W | D | S | |
| Seq ID NO 151 | 55 | F | L | D | T | T | I | W | N | C | |
| Seq ID NO 152 | 56 | F | L | D | T | T | I | W | N | S | |
| Seq ID NO 153 | 57 | F | L | D | T | T | L | G | D | C | atratone |
| Seq ID NO 154 | 58 | F | L | D | T | T | L | G | D | S | |
| Seq ID NO 155 | 59 | F | L | D | T | T | L | G | N | C | |
| Seq ID NO 156 | 60 | F | L | D | T | T | L | G | N | S | |
| Seq ID NO 157 | 61 | F | L | D | T | T | L | W | D | C | atratone |
| Seq ID NO 158 | 62 | F | L | D | T | T | L | W | D | S | |
| Seq ID NO 159 | 63 | F | L | D | T | T | L | W | N | C | |
| Seq ID NO 160 | 64 | F | L | D | T | T | L | W | N | S | |
| Seq ID NO 161 | 65 | F | L | E | I | P | I | G | D | C | |
| Seq ID NO. 162 | 66 | F | L | E | I | P | I | G | D | S | |
| Seq ID NO. 163 | 67 | F | L | E | I | P | I | G | N | C | |
| Seq ID NO 164 | 68 | F | L | E | I | P | I | G | N | S | |
| Seq ID NO 165 | 69 | F | L | E | I | P | I | W | D | C | |
| Seq ID NO 166 | 70 | F | L | E | I | P | I | W | D | S | |
| Seq ID NO 167 | 71 | F | L | E | I | P | I | W | N | C | |
| Seq ID NO 168 | 72 | F | L | E | I | P | I | W | N | S | |
| Seq ID NO 169 | 73 | F | L | E | I | P | L | G | D | C | |
| Seq ID NO. 170 | 74 | F | L | E | I | P | L | G | D | S | |
| Seq ID NO 171 | 75 | F | L | E | I | P | L | G | N | C | |
| Seq ID NO 172 | 76 | F | L | E | I | P | L | G | N | S | |
| Seq ID NO 173 | 77 | F | L | E | I | P | L | W | D | C | |
| Seq ID NO 174 | 78 | F | L | E | I | P | L | w | D | S | |
| Seq ID NO 175 | 79 | F | L | E | I | P | L | W | N | C | |
| Seq ID NO 176 | 80 | F | L | E | I | P | L | W | N | S | |
| Seq ID NO 177 | 81 | F | L | E | I | T | I | G | D | C | |
| Seq ID NO 178 | 82 | F | L | E | I | T | I | G | D | S | |
| Seq ID NO 179 | 83 | F | L | E | I | T | I | G | N | C | |
| Seq ID NO 180 | 84 | F | L | E | I | T | I | G | N | S | |
| Seq ID NO 181 | 85 | F | L | E | I | T | I | W | D | C | |
| Seq ID NO 182 | 86 | F | L | E | I | T | I | W | D | S | |
| Seq ID NO 183 | 87 | F | L | E | I | T | I | W | N | C | |
| Seq ID NO 184 | 88 | F | L | E | I | T | I | W | N | S | |
| Seq ID NO 185 | 89 | F | L | E | I | T | L | G | D | C | |
| Seq ID NO 186 | 90 | F | L | E | I | T | L | G | D | S | |
| Seq ID NO 187 | 91 | F | L | E | I | T | L | G | N | C | |
| Seq ID NO 188 | 92 | F | L | E | I | T | L | G | N | S | |
| Seq ID NO 189 | 93 | F | L | E | I | T | L | W | D | C | |
| Seq ID NO 190 | 94 | F | L | E | I | T | L | W | D | S | |
| Seq ID NO 191 | 95 | F | L | E | I | T | L | W | N | C | |
| Seq ID NO 192 | 96 | F | L | E | I | T | L | W | N | S | |
| Seq ID NO 193 | 97 | F | L | E | T | P | I | G | D | C | |
| Seq ID NO 194 | 98 | F | L | E | T | P | I | G | D | S | |
| Seq ID NO 195 | 99 | F | L | E | T | P | I | G | N | C | |
| Seq ID NO 196 | 100 | F | L | E | T | P | I | G | N | S | |
| Seq ID NO 197 | 101 | F | L | E | T | P | I | W | D | C | |
| Seq ID NO 198 | 102 | F | L | E | T | P | I | W | D | S | |
| Seq ID NO 199 | 103 | F | L | E | T | P | I | W | N | C | |
| Seq ID NO 200 | 104 | F | L | E | T | P | I | W | N | S | |
| Seq ID NO 201 | 105 | F | L | E | T | P | L | G | D | C | |
| Seq ID NO 202 | 106 | F | L | E | T | P | L | G | D | S | |
| Seq ID NO 203 | 107 | F | L | E | T | P | L | G | N | C | |
| Seq ID NO 204 | 108 | F | L | E | T | P | L | G | N | S | |
| Seq ID NO 205 | 109 | F | L | E | T | P | L | W | D | C | |
| Seq ID NO 206 | 110 | F | L | E | T | P | L | W | D | S | |
| Seq ID NO 207 | 111 | F | L | E | T | P | L | W | N | C | |
| Seq ID NO 208 | 112 | F | L | E | T | P | L | W | N | S | |
| Seq ID NO 209 | 113 | F | L | E | T | T | I | G | D | C | atratone |
| Seq ID NO 210 | 114 | F | L | E | T | T | I | G | D | S | |
| Seq ID NO 211 | 115 | F | L | E | T | T | I | G | N | C | |
| Seq ID NO 212 | 116 | F | L | E | T | T | I | G | N | S | |
| Seq ID NO 213 | 117 | F | L | E | T | T | I | W | D | C | atratone |
| Seq ID NO 214 | 118 | F | L | E | T | T | I | W | D | S | |
| Seq ID NO 215 | 119 | F | L | E | T | T | I | W | N | C | |
| Seq ID NO 216 | 120 | F | L | E | T | T | I | W | N | S | |
| Seq ID NO 217 | 121 | F | L | E | T | T | L | G | D | C | nme-atrazine, |
| | | | | | | | | | | | ametryn, |
| | | | | | | | | | | | atratone |
| Seq ID NO 218 | 122 | F | L | E | T | T | L | G | D | S | |
| Seq ID NO. 219 | 123 | F | L | E | T | T | L | G | N | C | |
| Seq ID NO 220 | 124 | F | L | E | T | T | L | G | N | S | atrazine |
| Seq ID NO 221 | 125 | F | L | E | T | T | L | W | D | C | nme-atrazine, |
| | | | | | | | | | | | ametryn, |
| | | | | | | | | | | | atratone |
| Seq ID NO. 222 | 126 | F | L | E | T | T | L | W | D | S | |
| Seq ID NO 223 | 127 | F | L | E | T | T | L | W | N | C | |
| Seq ID NO. 224 | 128 | F | L | E | T | T | L | W | N | S | atrazine |
| Seq ID NO 225 | 129 | F | V | D | I | P | I | G | D | C | |
| Seq ID NO 226 | 130 | F | V | D | I | P | I | G | D | S | |
| Seq ID NO 227 | 131 | F | V | D | I | P | I | G | N | C | |
| Seq ID NO 228 | 132 | F | V | D | I | P | I | G | N | S | |
| Seq ID NO 229 | 133 | F | V | D | I | P | I | W | D | C | |
| Seq ID NO 230 | 134 | F | V | D | I | P | I | W | D | S | |
| Seq ID NO 231 | 135 | F | V | D | I | P | I | W | N | C | |
| Seq ID NO 232 | 136 | F | V | D | I | P | I | W | N | S | |
| Seq ID NO 233 | 137 | F | V | D | I | P | L | G | D | C | |
| Seq. ID NO 234 | 138 | F | V | D | I | P | L | G | D | S | |
| Seq ID NO 235 | 139 | F | V | D | I | P | L | G | N | C | |
| Seq ID NO 236 | 140 | F | V | D | I | P | L | G | N | S | |
| Seq ID NO 237 | 141 | F | V | D | I | P | L | W | D | C | |
| Seq ID NO 238 | 142 | F | V | D | I | p | L | W | D | S | |
| Seq ID NO 239 | 143 | F | V | D | I | P | L | W | N | C | |
| Seq ID NO 240 | 144 | F | V | D | I | P | L | W | N | S | |
| Seq ID NO 241 | 145 | F | V | D | I | T | I | G | D | C | |
| Seq ID NO 242 | 146 | F | V | D | I | T | I | G | D | S | |
| Seq ID NO 243 | 147 | F | V | D | I | T | I | G | N | C | |
| Seq ID NO 244 | 148 | F | V | D | I | T | I | G | N | S | |
| Seq ID NO. 245 | 149 | F | V | D | I | T | I | W | D | C | |
| Seq ID NO. 246 | 150 | F | V | D | I | T | I | W | D | S | |
| Seq. ID NO 247 | 151 | F | V | D | I | T | I | W | N | C | |
| Seq ID NO 248 | 152 | F | V | D | I | T | I | W | N | S | |
| Seq ID NO 249 | 153 | F | V | D | I | T | L | G | D | C | |
| Seq ID NO 250 | 154 | F | V | D | I | T | L | G | D | S | |
| Seq ID NO 251 | 155 | F | V | D | I | T | L | G | N | C | |
| Seq ID NO 252 | 156 | F | V | D | I | T | L | G | N | S | |
| Seq ID NO 253 | 157 | F | V | D | I | T | L | W | D | C | |
| Seq ID NO 254 | 158 | F | V | D | I | T | L | W | D | S | |
| Seq ID NO 255 | 159 | F | V | D | I | T | L | W | N | C | |
| Seq ID NO. 256 | 160 | F | V | D | I | T | L | W | N | S | |
| Seq ID NO 257 | 161 | F | V | D | T | P | I | G | D | C | |
| Seq ID NO 258 | 162 | F | V | D | T | P | I | G | D | S | |
| Seq ID NO 259 | 163 | F | V | D | T | P | I | G | N | C | |
| Seq ID NO 260 | 164 | F | V | D | T | P | I | G | N | S | |
| Seq ID NO 261 | 165 | F | V | D | T | P | I | W | D | C | |
| Seq ID NO 262 | 166 | F | V | D | T | P | I | W | D | S | |
| Seq ID NO 263 | 167 | F | V | D | T | P | I | W | N | C | |
| Seq ID NO 264 | 168 | F | V | D | T | P | L | W | N | S | |
| Seq ID NO 265 | 169 | F | V | D | T | P | L | G | D | C | |
| Seq ID NO 266 | 170 | F | V | D | T | P | L | G | D | S | |
| Seq ID NO 267 | 171 | F | V | D | T | P | L | G | N | C | |
| Seq ID NO 268 | 172 | F | V | D | T | P | L | G | N | S | |
| Seq ID NO 269 | 173 | F | V | D | T | P | L | W | D | C | |
| Seq ID NO 270 | 174 | F | V | D | T | P | L | W | D | S | |
| Seq. ID NO 271 | 175 | F | V | D | T | P | L | W | N | C | |
| Seq ID NO 272 | 176 | F | V | D | T | P | L | W | N | S | |
| Seq ID NO. 273 | 177 | F | V | D | T | T | I | G | D | C | |
| Seq ID NO 274 | 178 | F | V | D | T | T | I | G | D | S | |
| Seq ID NO 275 | 179 | F | V | D | T | T | I | G | N | C | |
| Seq ID NO 276 | 180 | F | V | D | T | T | I | G | N | S | |
| Seq ID NO. 277 | 181 | F | V | D | T | T | I | W | D | C | |
| Seq ID NO 278 | 182 | F | V | D | T | T | I | W | D | S | |
| Seq ID NO 279 | 183 | F | V | D | T | T | I | W | N | C | |
| Seq ID NO 280 | 184 | F | V | D | T | T | I | W | N | S | |
| Seq ID NO 281 | 185 | F | V | D | T | T | L | G | D | C | |
| Seq ID NO 282 | 186 | F | V | D | T | T | L | G | D | S | |
| Seq ID NO 283 | 187 | F | V | D | T | T | L | G | N | C | |
| Seq ID NO 284 | 188 | F | V | D | T | T | L | G | N | S | |
| Seq ID NO 285 | 189 | F | V | D | T | T | L | W | D | C | |
| Seq ID NO 286 | 190 | F | V | D | T | T | L | W | D | S | |
| Seq ID NO 287 | 191 | F | V | D | T | T | L | W | N | C | |
| Seq. ID NO 288 | 192 | F | V | D | T | T | L | W | N | S | |
| Seq ID NO. 289 | 193 | F | V | E | I | P | I | G | D | C | |
| Seq ID NO 290 | 194 | F | V | E | I | P | I | G | D | S | |
| Seq ID NO 291 | 195 | F | V | E | I | P | I | G | N | C | |
| Seq ID NO 292 | 196 | F | V | E | I | P | I | G | N | S | |
| Seq ID NO 293 | 197 | F | V | E | I | P | I | W | D | C | |
| Seq ID NO 294 | 198 | F | V | E | I | P | I | W | D | S | |
| Seq ID NO 295 | 199 | F | V | E | I | P | I | W | N | C | |
| Seq ID NO 296 | 200 | F | V | E | I | P | I | W | N | S | |
| Seq ID NO 297 | 201 | F | V | E | I | P | L | G | D | C | |
| Seq ID NO 298 | 202 | F | V | E | I | P | L | G | D | S | |
| Seq ID NO 299 | 203 | F | V | E | I | P | L | G | N | C | |
| Seq ID NO 300 | 204 | F | V | E | I | P | L | G | N | S | |
| Seq ID NO 301 | 205 | F | V | E | I | P | L | W | D | C | |
| Seq ID NO 302 | 206 | F | V | E | I | P | L | W | D | S | |
| Seq ID NO 303 | 207 | F | V | E | I | P | L | W | N | C | |
| Seq ID NO. 304 | 208 | F | V | E | I | P | L | W | N | S | |
| Seq ID NO 305 | 209 | F | V | E | I | T | I | G | D | C | |
| Seq ID NO. 306 | 210 | F | V | E | I | T | I | G | D | S | |
| Seq ID NO 307 | 211 | F | V | E | I | T | I | G | N | C | |
| Seq ID NO 308 | 212 | F | V | E | I | T | I | G | N | S | |
| Seq ID NO 309 | 213 | F | V | E | I | T | I | W | D | C | |
| Seq ID NO 310 | 214 | F | V | E | I | T | I | W | D | S | |
| Seq ID NO 311 | 215 | F | V | E | I | T | I | W | N | C | |
| Seq ID NO 312 | 216 | F | V | E | I | T | I | W | N | S | |
| Seq ID NO 313 | 217 | F | V | E | I | T | L | G | D | C | |
| Seq ID NO 314 | 218 | F | V | E | I | T | L | G | D | S | |
| Seq ID NO 315 | 219 | F | V | E | I | T | L | G | N | C | |
| Seq ID NO 316 | 220 | F | V | E | I | T | L | G | N | S | |
| Seq ID NO 317 | 221 | F | V | E | I | T | L | W | D | C | |
| Seq ID NO 318 | 222 | F | V | E | I | T | L | W | D | S | |
| Seq ID NO 319 | 223 | F | V | E | I | T | L | W | N | C | |
| Seq ID NO 320 | 224 | F | V | E | I | T | L | W | N | S | |
| Seq ID NO 321 | 225 | F | V | E | T | P | I | G | D | C | |
| Seq ID NO 322 | 226 | F | V | E | T | P | I | G | D | S | |
| Seq ID NO. 323 | 227 | F | V | E | T | P | I | G | N | C | |
| Seq ID NO 324 | 228 | F | V | E | T | F | I | G | N | S | |
| Seq ID NO 325 | 229 | F | V | E | T | P | I | W | D | C | |
| Seq ID NO 326 | 230 | F | V | E | T | P | I | W | D | S | |
| Seq ID NO 327 | 231 | F | V | E | T | P | I | W | N | C | |
| Seq ID NO 328 | 232 | F | V | E | T | P | I | W | N | S | |
| Seq ID NO 329 | 233 | F | V | E | T | P | L | G | D | C | |
| Seq. ID NO 330 | 234 | F | V | E | T | P | L | G | D | S | |
| Seq ID NO 331 | 235 | F | V | E | T | P | L | G | N | C | |
| Seq ID NO. 332 | 236 | F | V | E | T | P | L | G | N | S | |
| Seq ID NO 333 | 237 | F | V | E | T | P | L | W | D | C | |
| Seq ID NO 334 | 238 | F | V | E | T | P | L | W | D | S | |
| Seq ID NO 335 | 239 | F | V | E | T | P | L | W | N | C | |
| Seq ID NO 336 | 240 | F | V | E | T | P | L | W | N | S | |
| Seq ID NO 337 | 241 | F | V | E | T | T | I | G | D | C | |
| Seq ID NO 338 | 242 | F | V | E | T | T | I | G | D | S | |
| Seq ID NO 339 | 243 | F | V | F | T | T | I | G | N | C | |
| Seq ID NO 340 | 244 | F | V | E | T | T | I | G | N | S | propazine |
| Seq ID NO 341 | 245 | F | V | E | T | T | I | W | D | C | |
| Seq ID NO 342 | 246 | F | V | E | T | T | I | W | D | S | |
| Seq ID NO 343 | 247 | F | V | E | T | T | I | W | N | C | |
| Seq ID NO 344 | 248 | F | V | E | T | T | I | W | N | S | propazine |
| Seq ID NO 345 | 249 | F | V | E | T | T | L | G | D | C | amino- |
| | | | | | | | | | | | propazine |
| Seq ID NO 346 | 250 | F | V | E | T | T | L | G | D | S | |
| Seq ID NO 347 | 251 | F | V | E | T | T | L | G | N | C | |
| Seq ID NO 348 | 252 | F | V | E | T | T | L | G | N | S | propazine, |
| | | | | | | | | | | | atrazine |
| Seq ID NO 349 | 253 | F | V | E | T | T | L | W | D | C | |
| Seq ID NO 350 | 254 | F | V | E | T | T | L | W | D | S | |
| Seq ID NO 351 | 255 | F | V | E | T | T | L | W | N | C | |
| Seq ID NO 352 | 256 | F | V | E | T | T | L | W | N | S | propazine, |
| | | | | | | | | | | | atrazine |
| Seq ID NO 353 | 257 | L | L | D | I | P | I | G | D | C | |
| Seq ID NO 354 | 258 | L | L | D | I | P | I | G | D | S | |
| Seq ID NO 355 | 259 | L | L | D | I | P | I | G | N | C | |
| Seq ID NO 356 | 260 | L | L | D | I | P | I | G | N | S | |
| Seq ID NO 357 | 261 | L | L | D | I | P | I | W | D | C | |
| Seq ID NO 358 | 262 | L | L | D | I | P | I | W | D | S | |
| Seq ID NO 359 | 263 | L | L | D | I | P | I | W | N | C | |
| Seq ID NO 360 | 264 | L | L | D | I | P | I | W | N | S | |
| Seq ID NO 361 | 265 | L | L | D | I | P | L | G | D | C | |
| Seq ID NO 362 | 266 | L | L | 0 | I | P | L | G | D | S | |
| Seq ID NO 363 | 267 | L | L | D | I | P | L | G | N | C | |
| Seq ID NO 364 | 268 | L | L | D | I | P | L | G | N | S | |
| Seq ID NO 365 | 269 | L | L | D | I | P | L | W | D | C | |
| Seq ID NO 366 | 270 | L | L | D | I | P | L | W | D | S | |
| Seq ID NO 367 | 271 | L | L | D | I | P | L | W | N | C | |
| Seq ID NO 368 | 272 | L | L | D | I | P | L | W | N | S | |
| Seq ID NO. 369 | 273 | L | L | D | I | T | I | G | D | C | |
| Seq ID NO 370 | 274 | L | L | D | I | T | I | G | D | S | |
| Seq ID NO 371 | 275 | L | L | D | I | T | I | G | N | C | |
| Seq ID NO 372 | 276 | L | L | D | I | T | I | G | N | S | |
| Seq ID NO 373 | 277 | L | L | D | I | T | I | W | D | C | |
| Seq ID NO 374 | 278 | L | L | D | I | T | I | W | D | S | |
| Seq ID NO 375 | 279 | L | L | D | I | T | I | W | N | C | |
| Seq ID NO 376 | 280 | L | L | D | I | T | I | W | N | S | |
| Seq ID NO 377 | 281 | L | L | D | I | T | L | G | D | C | |
| Seq ID NO 378 | 282 | L | L | D | I | T | L | G | D | S | |
| Seq ID NO 379 | 283 | L | L | D | I | T | L | G | N | C | |
| Seq ID NO 380 | 284 | L | L | D | I | T | L | G | N | S | |
| Seq ID NO 381 | 285 | L | L | D | I | T | L | W | D | C | |
| Seq ID NO 382 | 286 | L | L | D | I | T | L | W | D | S | |
| Seq ID NO 383 | 287 | L | L | D | I | T | L | W | N | C | |
| Seq ID NO 384 | 288 | L | L | D | I | T | L | W | N | S | |
| Seq ID NO 385 | 289 | L | L | D | T | P | I | G | D | C | |
| Seq ID NO 386 | 290 | L | L | D | T | P | I | G | D | 5 | |
| Seq ID NO 387 | 291 | L | L | D | T | P | I | 0 | N | C | |
| Seq ID NO 388 | 292 | L | L | D | T | P | I | G | N | S | |
| Seq ID NO 389 | 293 | L | L | D | T | P | I | W | D | C | |
| Seq ID NO 390 | 294 | L | L | D | T | P | I | W | D | S | |
| Seq ID NO 391 | 295 | L | L | D | T | P | I | W | N | C | |
| Seq ID NO 392 | 296 | L | L | D | T | P | I | W | N | S | |
| Seq ID NO 393 | 297 | L | L | D | T | P | L | G | D | C | |
| Seq ID NO 394 | 298 | L | L | D | T | P | L | G | D | S | |
| Seq ID NO 395 | 299 | L | L | D | T | P | L | G | N | C | |
| Seq ID NO 396 | 300 | L | L | D | T | P | L | G | N | S | |
| Seq ID NO 397 | 301 | L | L | D | T | P | L | W | D | C | |
| Seq ID NO 398 | 302 | L | L | D | T | P | L | W | D | S | |
| Seq ID NO 399 | 303 | L | L | D | T | P | L | W | N | C | |
| Seq ID NO 400 | 304 | L | L | D | T | P | L | W | N | S | |
| Seq ID NO 401 | 305 | L | L | D | T | T | I | G | D | C | amino- |
| | | | | | | | | | | | atrazine, |
| | | | | | | | | | | | atratone |
| Seq ID NO 402 | 306 | L | L | D | T | T | I | G | D | S | |
| Seq ID NO 403 | 307 | L | L | D | T | T | I | G | N | C | |
| Seq ID NO 404 | 308 | L | L | D | T | T | I | G | N | S | |
| Seq ID NO 405 | 309 | L | L | D | T | T | I | W | D | C | amino- |
| | | | | | | | | | | | atrazine, |
| | | | | | | | | | | | atratone |
| Seq ID NO 406 | 310 | L | L | D | T | T | I | W | D | S | |
| Seq ID NO 407 | 311 | L | L | D | T | T | I | W | N | C | |
| Seq ID NO 408 | 312 | L | L | D | T | T | I | W | N | S | |
| Seq ID NO 409 | 313 | L | L | D | T | T | L | G | D | C | nme-atrazine, |
| | | | | | | | | | | | amino- |
| | | | | | | | | | | | atrazine, |
| | | | | | | | | | | | ametryn, |
| | | | | | | | | | | | atratone |
| Seq ID NO 410 | 314 | L | L | D | T | T | L | G | D | S | ametryn |
| Seq ID NO 411 | 315 | L | L | D | T | T | L | G | N | C | |
| Seq ID NO 412 | 316 | L | L | D | T | T | L | G | N | S | |
| Seq ID NO 413 | 317 | L | L | D | T | T | L | W | D | C | nme-atrazine, |
| | | | | | | | | | | | amino- |
| | | | | | | | | | | | atrazine, |
| | | | | | | | | | | | ametryn, |
| | | | | | | | | | | | atratone |
| Seq ID NO 414 | 318 | L | L | D | T | T | L | W | G | S | ametryn |
| Seq ID NO 415 | 319 | L | L | D | T | T | L | W | N | C | |
| Seq ID NO. 416 | 320 | L | L | D | T | T | L | W | N | S | |
| Seq ID NO 417 | 321 | L | L | E | I | P | I | G | G | C | |
| Seq ID NO 418 | 322 | L | L | E | I | P | I | G | G | S | |
| Seq ID NO 419 | 323 | L | L | E | I | P | I | G | N | C | |
| Seq ID NO 420 | 324 | L | L | E | I | P | I | G | N | S | |
| Seq ID NO 421 | 325 | L | L | E | I | P | I | W | G | C | |
| Seq ID NO 422 | 326 | L | L | E | I | P | I | W | G | S | |
| Seq ID NO 423 | 327 | L | L | E | I | P | I | W | N | C | |
| Seq ID NO 424 | 328 | L | L | E | I | P | I | W | N | S | |
| Seq ID NO 425 | 329 | L | L | E | I | P | L | G | G | C | |
| Seq ID NO 426 | 330 | L | L | E | I | P | L | G | G | S | |
| Seq ID NO 427 | 331 | L | L | E | I | P | L | G | N | C | |
| Seq ID NO 428 | 332 | L | L | E | I | P | L | G | N | S | |
| Seq ID NO 429 | 333 | L | L | E | I | P | L | W | G | C | |
| Seq ID NO 430 | 334 | L | L | E | I | F | L | W | G | S | |
| Seq ID NO 431 | 335 | L | L | E | I | P | L | W | N | C | |
| Seq ID NO 432 | 336 | L | L | E | I | P | L | W | N | S | |
| Seq ID NO 433 | 337 | L | L | E | I | T | I | G | G | C | |
| Seq ID NO 434 | 338 | L | L | E | I | T | I | G | G | S | |
| Seq ID NO 435 | 339 | L | L | E | I | T | I | G | N | C | |
| Seq ID NO 436 | 340 | L | L | E | I | T | I | G | N | S | |
| Seq ID NO 437 | 341 | L | L | E | I | T | I | W | G | C | |
| Seq ID NO 438 | 342 | L | L | E | I | T | I | W | G | S | |
| Seq ID NO 439 | 343 | L | L | E | I | T | I | W | N | C | |
| Seq ID NO 440 | 344 | L | L | E | I | T | I | W | N | S | |
| Seq ID NO 441 | 345 | L | L | E | I | T | L | G | G | C | nme-atrazine |
| Seq ID NO 442 | 346 | L | L | E | I | T | L | G | G | S | |
| Seq ID NO 443 | 347 | L | L | E | I | T | L | G | N | C | |
| Seq ID NO 444 | 348 | L | L | E | I | T | L | G | N | S | |
| Seq ID NO 445 | 349 | L | L | E | I | T | L | W | D | C | nme-atrazine |
| Seq ID NO 446 | 350 | L | L | E | I | T | L | W | D | S | |
| Seq ID NO 447 | 351 | L | L | E | I | T | L | W | N | C | |
| Seq ID NO 448 | 352 | L | L | E | I | T | L | W | N | S | |
| Seq ID NO 449 | 353 | L | L | E | T | P | I | G | D | C | |
| Seq ID NO 450 | 354 | L | L | E | T | P | I | G | D | S | |
| Seq ID NO 451 | 355 | L | L | E | T | P | I | G | N | C | |
| Seq ID NO 452 | 356 | L | L | E | T | P | I | G | N | S | |
| Seq ID NO 453 | 357 | L | L | E | T | P | I | W | D | C | |
| Seq ID NO 454 | 358 | L | L | E | T | P | I | W | D | S | |
| Seq ID NO 455 | 359 | L | L | E | T | P | I | W | N | C | |
| Seq ID NO 456 | 360 | L | L | E | T | P | I | W | N | S | |
| Seq ID NO 457 | 361 | L | L | E | T | P | L | G | D | C | |
| Seq ID NO 458 | 362 | L | L | E | T | P | L | G | D | S | |
| Seq ID NO 459 | 363 | L | L | E | T | P | L | G | N | C | |
| Seq ID NO 460 | 364 | L | L | E | T | P | L | G | N | S | |
| Seq ID NO 461 | 365 | L | L | E | T | P | L | W | D | C | |
| Seq ID NO 462 | 366 | L | L | E | T | P | L | W | D | S | |
| Seq ID NO 463 | 367 | L | L | E | T | P | L | W | N | C | |
| Seq ID NO 464 | 368 | L | L | E | T | P | L | W | N | S | |
| Seq ID NO 465 | 369 | L | L | E | T | T | I | G | D | C | nme-atrazine, |
| | | | | | | | | | | | amino- |
| | | | | | | | | | | | atrazine, |
| | | | | | | | | | | | ametryn, |
| | | | | | | | | | | | atratone |
| Seq ID NO 466 | 370 | L | L | E | T | T | I | G | D | S | ametryn |
| Seq ID NO 467 | 371 | L | L | E | T | T | I | G | N | C | |
| Seq ID NO 468 | 372 | L | L | E | T | T | I | G | N | S | |
| Seq ID NO 469 | 373 | L | L | E | T | T | I | W | D | C | nme-atrazine, |
| | | | | | | | | | | | amino- |
| | | | | | | | | | | | atrazine, |
| | | | | | | | | | | | atratone |
| Seq ID NO 470 | 374 | L | L | E | T | T | I | W | D | S | |
| Seq ID NO 471 | 375 | L | L | E | T | T | I | W | N | C | |
| Seq ID NO 472 | 376 | L | L | E | T | T | I | W | N | S | |
| Seq ID NO 473 | 377 | L | L | E | T | T | L | G | D | C | |
| | | | | | | | | | | | amino- |
| | | | | | | | | | | | atrazine, |
| | | | | | | | | | | | ametryn, |
| | | | | | | | | | | | atratone |
| Seq ID NO 474 | 378 | L | L | E | T | T | L | G | D | S | |
| Seq ID NO 475 | 379 | L | L | E | T | T | L | G | N | C | |
| Seq ID NO 476 | 380 | L | L | E | T | T | L | G | N | S | |
| Seq. ID NO 477 | 381 | L | L | E | T | T | L | W | D | C | nme-atrazine, |
| | | | | | | | | | | | amino- |
| | | | | | | | | | | | atrazine, |
| | | | | | | | | | | | ametryn, |
| | | | | | | | | | | | atratone |
| Seq ID NO 478 | 382 | L | L | E | T | T | L | W | D | S | ametryn |
| Seq ID NO 479 | 383 | L | L | E | T | T | L | W | N | C | ametryn |
| Seq ID NO 480 | 384 | L | L | E | I | T | L | W | N | C | |
| Seq ID NO 481 | 385 | L | V | D | I | P | I | G | D | C | |
| Seq ID NO 482 | 386 | L | V | D | I | P | I | G | D | S | |
| Seq ID NO. 483 | 387 | L | V | D | I | P | I | G | N | C | |
| Seq ID NO 484 | 388 | L | V | D | I | P | I | G | N | S | |
| Seq ID NO 485 | 389 | L | V | D | I | P | I | W | D | C | |
| Seq ID NO 486 | 390 | L | V | D | I | P | I | W | D | S | |
| Seq ID NO 487 | 391 | L | V | D | I | P | I | W | N | C | |
| Seq ID NO 488 | 392 | L | V | D | I | P | I | W | N | S | |
| Seq ID NO 489 | 393 | L | V | D | I | P | L | G | D | C | |
| Seq ID NO 490 | 394 | L | V | D | I | P | L | G | D | S | |
| Seq ID NO 491 | 395 | L | V | D | I | P | L | G | N | S | |
| Seq ID NO 492 | 396 | L | V | D | I | P | L | W | D | C | |
| Seq ID NO 493 | 397 | L | V | D | I | P | L | W | D | C | |
| Seq ID NO 494 | 398 | L | V | D | I | P | L | W | D | S | |
| Seq ID NO 495 | 399 | L | V | D | I | P | L | W | N | C | |
| Seq ID NO 496 | 400 | L | V | D | I | P | L | W | N | S | |
| Seq ID NO 497 | 401 | L | V | D | I | T | I | G | D | C | |
| Seq ID NO 498 | 402 | L | V | D | I | T | I | G | D | S | |
| Seq ID NO 499 | 403 | L | V | D | I | T | I | G | N | C | |
| Seq ID NO 500 | 404 | L | V | D | I | T | I | G | N | S | |
| Seq ID NO 501 | 405 | L | V | D | I | T | I | W | D | C | |
| Seq ID NO 502 | 406 | L | V | D | I | T | I | W | D | S | |
| Seq ID NO 503 | 407 | L | V | D | I | T | I | W | N | C | |
| Seq ID NO 504 | 408 | L | V | D | I | T | I | W | N | S | |
| Seq ID NO. 505 | 409 | L | V | D | I | T | L | G | D | C | |
| Seq ID NO 506 | 410 | L | V | D | I | T | L | G | D | S | |
| Seq ID NO 507 | 411 | L | V | D | I | T | L | G | N | C | |
| Seq ID NO 508 | 412 | L | V | D | I | T | L | G | N | S | |
| Seq ID NO 509 | 413 | L | V | D | I | T | L | W | D | C | |
| Seq ID NO 510 | 414 | L | V | D | I | T | L | W | D | S | |
| Seq ID NO 511 | 415 | L | V | D | I | T | L | W | N | C | |
| Seq ID NO 512 | 416 | L | V | D | I | T | L | W | N | S | |
| Seq ID NO 513 | 417 | L | V | D | T | P | I | G | 0 | C | |
| Seq ID NO 514 | 418 | L | V | D | T | P | I | G | 0 | S | |
| Seq ID NO 515 | 419 | L | V | D | T | P | I | G | N | C | |
| Seq ID NO 516 | 420 | L | V | D | T | P | I | G | N | S | |
| Seq ID NO 517 | 421 | L | V | D | T | P | I | W | D | C | |
| Seq ID NO 518 | 422 | L | V | D | T | P | I | W | D | S | |
| Seq ID NO 519 | 423 | L | V | D | T | P | I | W | N | C | |
| Seq ID NO 520 | 424 | L | V | D | T | P | I | W | N | S | |
| Seq ID NO 521 | 425 | L | V | D | T | P | L | G | D | C | |
| Seq ID NO 522 | 426 | L | V | D | T | P | L | G | D | S | |
| Seq ID NO 523 | 427 | L | V | D | T | P | L | G | N | C | |
| Seq ID NO 524 | 428 | L | V | D | T | P | L | G | N | S | |
| Seq ID NO 525 | 429 | L | V | D | T | P | L | W | D | C | |
| Seq ID NO 526 | 430 | L | V | D | T | P | L | W | D | S | |
| Seq ID NO 527 | 431 | L | V | D | T | P | L | W | N | C | |
| Seq ID NO 528 | 432 | L | V | D | T | P | L | W | N | S | |
| Seq ID NO 529 | 433 | L | V | D | T | T | I | G | D | C | |
| Seq ID NO 530 | 434 | L | V | D | T | T | I | G | D | S | |
| Seq ID NO 531 | 435 | L | V | D | T | T | I | G | N | C | |
| Seq ID NO 532 | 436 | L | V | D | T | T | I | G | N | S | |
| Seq ID NO 533 | 437 | L | V | D | T | T | I | W | D | C | |
| Seq ID NO 534 | 438 | L | V | D | T | T | I | W | D | S | |
| Seq ID NO 535 | 439 | L | V | D | T | T | I | W | N | C | |
| Seq ID NO 536 | 440 | L | V | D | T | T | I | W | N | S | |
| Seq ID NO 537 | 441 | L | V | D | T | T | L | G | D | C | amino- |
| | | | | | | | | | | | propazine |
| Seq ID NO 538 | 442 | L | V | D | T | T | L | G | D | S | |
| Seq ID NO 539 | 443 | L | V | D | T | T | L | G | N | C | |
| Seq ID NO 540 | 444 | L | V | D | T | T | L | G | N | S | |
| Seq ID NO 541 | 445 | L | V | D | T | T | L | W | D | C | |
| Seq ID NO 542 | 446 | L | V | D | T | T | L | W | D | S | |
| Seq ID NO 543 | 447 | L | V | D | T | T | L | W | N | C | |
| Seq ID NO 544 | 448 | L | V | D | T | T | L | W | N | S | |
| Seq ID NO 545 | 449 | L | V | E | I | P | I | G | D | C | |
| Seq ID NO 546 | 450 | L | V | E | I | P | I | G | D | S | |
| Seq ID NO 547 | 451 | L | V | E | I | P | I | G | N | C | |
| Seq ID NO 548 | 452 | L | V | E | I | P | I | G | N | S | |
| Seq ID NO 549 | 453 | L | V | E | I | P | I | W | D | C | |
| Seq ID NO 550 | 454 | L | V | E | I | P | I | W | D | S | |
| Seq ID NO 551 | 455 | L | V | E | I | P | I | W | N | C | |
| Seq ID NO 552 | 456 | L | V | E | I | P | I | W | N | S | |
| Seq ID NO 553 | 457 | L | V | E | I | P | L | G | D | C | |
| Seq ID NO 554 | 458 | L | V | E | I | P | L | G | D | S | |
| Seq ID NO 555 | 459 | L | V | E | I | P | L | G | N | C | |
| Seq ID NO 556 | 460 | L | V | E | I | P | L | G | N | S | |
| Seq ID NO 557 | 461 | L | V | E | I | P | L | W | D | C | |
| Seq ID NO. 558 | 462 | L | V | E | I | P | L | W | D | S | |
| Seq ID NO 559 | 463 | L | V | E | I | P | L | W | N | C | |
| Seq ID NO 560 | 464 | L | V | E | I | F | L | W | N | S | |
| Seq ID NO 561 | 465 | L | V | E | I | T | I | G | D | C | NME- |
| | | | | | | | | | | | propazine |
| Seq ID NO 562 | 466 | L | V | E | I | T | I | G | D | S | prometryn |
| Seq ID NO 563 | 467 | L | V | E | I | T | I | G | N | C | |
| Seq ID NO 564 | 468 | L | V | E | I | T | I | G | N | S | |
| Seq ID NO 565 | 469 | L | V | E | I | T | I | W | D | C | NME- |
| | | | | | | | | | | | propazine |
| Seq ID NO 566 | 470 | L | V | E | I | T | I | W | D | S | |
| Seq ID NO 567 | 471 | L | V | E | I | T | I | W | N | C | |
| Seq ID NO 568 | 472 | L | V | E | I | T | I | W | N | S | |
| Seq ID NO 569 | 473 | L | V | E | I | T | L | G | D | C | NME- |
| | | | | | | | | | | | propazine |
| Seq ID NO 570 | 474 | L | V | E | I | T | L | G | D | S | |
| Seq ID NO 571 | 475 | L | V | E | I | T | L | G | N | C | |
| Seq ID NO 572 | 476 | L | V | E | I | T | L | G | N | S | |
| Seq ID NO 573 | 477 | L | V | E | I | T | L | W | D | C | NME- |
| | | | | | | | | | | | propazine |
| Seq ID NO 574 | 478 | L | V | E | I | T | L | W | D | S | |
| Seq ID NO 575 | 479 | L | V | E | I | T | L | W | N | C | |
| Seq ID NO 576 | 480 | L | V | E | I | T | L | W | N | S | |
| Seq ID NO 577 | 481 | L | V | E | T | P | I | G | D | C | |
| Seq ID NO 578 | 482 | L | V | E | T | P | I | G | D | S | prometryn |
| Seq ID NO 579 | 483 | L | V | E | T | P | I | G | N | C | |
| Seq ID NO 580 | 484 | L | V | E | T | P | I | G | N | S | |
| Seq ID NO 581 | 485 | L | V | E | T | P | I | W | D | C | |
| Seq ID NO 582 | 486 | L | V | E | T | P | I | W | C | S | |
| Seq. ID NO 583 | 487 | L | V | E | T | P | I | W | N | C | |
| Seq ID NO 584 | 488 | L | V | E | T | P | I | W | N | S | |
| Seq ID NO 585 | 489 | L | V | E | T | P | L | G | D | C | |
| Seq ID NO 586 | 490 | L | V | E | T | P | L | G | D | S | |
| Seq ID NO 587 | 491 | L | V | E | T | P | L | G | N | C | |
| Seq ID NO 588 | 492 | L | V | E | T | P | L | G | N | S | |
| Seq ID NO 589 | 493 | L | V | E | T | P | L | W | D | C | |
| Seq ID NO 590 | 494 | L | V | E | T | P | L | W | C | S | |
| Seq ID NO 591 | 495 | L | V | E | T | P | L | W | N | C | |
| Seq ID NO 592 | 496 | L | V | E | T | P | L | W | N | S | |
| Seq ID NO 593 | 497 | L | V | E | T | T | I | G | D | C | prometryn, |
| | | | | | | | | | | | amino- |
| Seq ID NO 594 | 498 | L | V | E | T | T | I | D | D | S | prometryn |
| Seq ID NO 595 | 499 | L | V | E | T | T | I | G | N | C | |
| Seq ID NO 596 | 500 | L | V | E | T | T | I | G | N | S | |
| Seq ID NO 597 | 501 | L | V | E | T | T | I | W | D | C | prometryn, |
| | | | | | | | | | | | NME- |
| Seq ID NO 598 | 502 | L | V | E | T | T | I | W | D | S | prometryn |
| Seq ID NO 599 | 503 | L | V | E | T | T | I | W | N | C | |
| Seq ID NO 600 | 504 | L | V | E | T | T | I | W | N | S | propazine |
| Seq. ID NO 601 | 505 | L | V | E | T | T | L | G | D | C | nme-atrazine, |
| | | | | | | | | | | | prometryn, |
| | | | | | | | | | | | amino- |
| Seq ID NO 602 | 506 | L | V | E | T | T | L | G | D | S | prometryn, |
| | | | | | | | | | | | amino- |
| | | | | | | | | | | | propazine, |
| Seq ID NO. 603 | 507 | L | V | E | T | T | L | G | N | C | amino- |
| | | | | | | | | | | | propazine |
| Seq ID NO 604 | 508 | L | V | E | T | T | L | G | N | S | propazine |
| Seq ID NO 605 | 509 | L | V | E | T | T | L | W | D | C | nme-atrazine, |
| | | | | | | | | | | | prometryn, |
| | | | | | | | | | | | amino- |
| | | | | | | | | | | | propazine, |
| Seq ID NO 606 | 510 | L | V | E | T | T | L | W | D | S | prometryn, |
| | | | | | | | | | | | NME- |
| | | | | | | | | | | | propazine |
| Seq ID NO 607 | 511 | L | V | E | T | T | L | W | N | C | |
| Seq ID NO 608 | 512 | L | V | E | T | T | L | W | N | S | propazine |

What is claimed is:

1. An isolated or recombinant nucleic acid, comprising:
a polynucleotide sequence selected from the group consisting of:
(a) SEQ ID NO: 1 to SEQ ID NO: 48 or a complementary polynucleotide sequence thereof;
(b) a polynucleotide sequence encoding a polypeptide selected from SEQ ID NO: 49 to SEQ ID NO: 608, or a complementary polynucleotide sequence thereof;
(c) a polynucleotide sequence which hybridizes under highly stringent conditions over substantially the entire length of polynucleotide sequence (a) or (b); and,
(d) a polynucleotide sequence comprising a fragment of (a), (b), or (c), which fragment encodes a polypeptide having triazine hydrolase activity, which fragment is unique as compared to a nucleic acid corresponding to U55933 or AF312304.

2. The nucleic acid of claim 1, which nucleic acid comprises a polynucleotide that encodes a hydrolase.

3. The nucleic acid of 2, which hydrolase hydrolyzes one or more of aminoatrazine, atrazine, triazine, atratone, N-methylatrazine, ametryn, aminopropazine, propazine, prometon, N-methylpropazine, prometryn, aminomorphazine, morphazine, morphatryn, morphaton, or N-methylmorphazine.

4. An isolated or recombinant nucleic acid comprising a polynucleotide sequence encoding a polypeptide, the polypeptide comprising:
an amino acid sequence comprising at least 20 contiguous amino acids of any one of SEQ ID NO: 49-608, which amino acid sequence is unique as compared to a polypeptide encoded by nucleic acids U55933 and AF312304.

5. The nucleic acid of claim 4, wherein the encoded polypeptide is about 450 to about 500 amino acids in length or about 474 amino acids in length.

6. The nucleic acid of claim 4, wherein the encoded polypeptide has triazine hydrolase activity.

7. The nucleic acid of claim 4, wherein the encoded polypeptide comprises at least 50 contiguous amino acid residues of any one of SEQ ID NO: 49-608.

8. The nucleic acid of claim 4, wherein the encoded polypeptide comprises at least 100 contiguous amino acid residues of any one of SEQ ID NO: 49-608.

9. The nucleic acid of claim 4, wherein the encoded polypeptide comprises at least 150 contiguous amino acid residues of any one of SEQ ID NO: 49-608.

10. The nucleic acid of claim 4, wherein the encoded polypeptide comprises an amino acid sequence selected from the group consisting of: SEQ ID NO: 49-608.

11. The nucleic acid of claim 4, comprising a polynucleotide sequence selected from the group consisting of: SEQ ID NO: 1-48.

12. A cell comprising the nucleic acid of claim 1 or 4.

13. The cell of claim 12, wherein the cell expresses a polypeptide encoded by the nucleic acid.

14. A vector comprising the nucleic acid of claim 1 or 4.

15. The vector of claim 14, wherein the vector comprises a plasmid, a cosmid, a phage, or a virus.

16. The vector of claim 14, wherein the vector is an expression vector.

17. A cell transduced by the vector of claim 14.

18. A remediation composition comprising a cell comprising the polypeptide of claim 1 or 4.

19. The remediation composition of claim 18, wherein the remediation composition is suitable for treating soil or water.

20. A remediation composition comprising the polypeptide of claim 1 or 4.

21. A composition produced by digesting one or more nucleic acid of claim 1 or 4 with a restriction endonuclease, an RNAse, or a DNAse.

22. A composition produced by a process comprising incubating one or more nucleic acid of claim 1 or 4 in the presence of deoxyribonucleotide triphosphates and a nucleic acid polymerase.

23. The composition of claim 22, wherein the nucleic acid polymerase is a thermostable polymerase.

24. A composition comprising one or more polypeptide from claims 1 or 4.

25. The composition of claim 24, wherein the composition comprises a library comprising at least ten nucleic acids.

26. An isolated or recombinant polypeptide encoded by the nucleic acid of acid claim 1 or 4.

27. The isolated or recombinant polypeptide of claim 26, comprising a sequence selected from the group consisting of: SEQ ID NO: 49-608.

28. The polypeptide of claim 26, having triazine hydrolase activity of at least 50,000 nM per hour.

29. The polypeptide of claim 26, having triazine hydrolase activity of at least about 2-fold to at least about 200-fold greater than an atrazine chlorohydrolase corresponding to U55933.

30. A polypeptide comprising at least 100 contiguous amino acids of a protein encoded by a polynucleotide sequence, the polynucleotide sequence selected from the group consisting of:
(a) SEQ ID NO: 1 to SEQ ID NO: 48;
(b) a coding polynucleotide sequence that encodes a first polypeptide selected from SEQ ID NO: 49-608; and,
(c) a complementary polynucleotide sequence which hybridizes under highly stringent conditions over substantially an entire length of a polynucleotide sequence of (a) or (b).

31. The polypeptide of claim 30, which polypeptide comprises triazine hydrolase activity.

32. The polypeptide of claim 30, comprising at least 150 contiguous amino acids of the encoded protein.

33. The polypeptide of claim 30, comprising at least 250 contiguous amino acids of the encoded protein.

34. The polypeptide of claim 30, comprising an amino acid sequence selected from the group consisting of: SEQ ID NO: 49-608.

35. The polypeptide of claim 30, further comprising a secretion/localization sequence.

36. The polypeptide of claim 30, further comprising a polypeptide purification subsequence.

37. The polypeptide of claim 36, wherein the sequence that facilitates purification is selected from the group consisting of: an epitope tag, a FLAG tag, a polyhistidine tag, and a GST fusion.

38. The polypeptide of claim 30, further comprising a Met at the N-terminus.

39. The polypeptide of claim 30, comprising a modified amino acid.

40. The polypeptide of claim 39, wherein the modified amino acid is selected from the group consisting of: a glycosylated amino acid, a PEGylated amino acid, a farnesylated amino acid, an acetylated amino acid, and a biotinylated amino acid.

41. A polypeptide which is specifically bound by a polyclonal antisera raised against one or more antigen, the antigen comprising the sequence of SEQ ID NO: 49-608, or a fragment thereof, wherein the antisera is subtracted with a naturally occurring hydrolase polypeptide corresponding to U55933 or a triazine hydrolase homologue nucleic acid that is present in a public database such as GenBank™ at the time of filing of the subject application.

42. An antibody or antisera produced by administering the polypeptide of claim 41 to a mammal, which antibody specifically binds one or more antigen, the antigen comprising a polypeptide comprising one or more of the amino acid sequences of SEQ ID NO: 49-608, which antibody does not specifically bind to a naturally occurring or recombinant hydrolase polypeptide corresponding to U55933.

43. An antibody or antisera which specifically binds a polypeptide, the polypeptide comprising a sequence selected from the group consisting of: SEQ ID NO: 49-608, wherein the antibody does not specifically bind to naturally hydrolase polypeptide corresponding to U55933.

44. A method of producing a polypeptide, the method comprising:
introducing into a population of cells a nucleic acid of claim 1 or 4, the nucleic acid operatively linked to a regulatory sequence effective to produce the encoded polypeptide;
culturing the cells in a culture medium to produce the polypeptide; and,
isolating the polypeptide from the cells or from the culture medium.

45. A method of producing a polypeptide, the method comprising
introducing into a population of cells a recombinant expression vector comprising the nucleic acid of claim 1 or 4;
culturing the cells in a culture medium to produce the polypeptide encoded by the expression vector; and,
isolating the polypeptide from the cells or from the culture medium.

46. A method of treating a sample comprising atrazine or a triazine derivative comprising:
adding a composition to a sample comprising atrazine or a triazine derivative,
wherein the composition comprises a polypeptide encoded by a nucleic acid of claim 1 or 4.

47. A method of DNA shuffling, the method comprising:
recursively recombining one or more nucleic acid of claim 1 or 4 with one or more additional nucleic acid, the additional nucleic acid encoding a triazine hydrolase homologue or subsequence thereof.

48. The method of claim 47, wherein said recursive recombination produces at least one library of recombinant triazine hydrolase nucleic acids.

49. A nucleic acid library produced by the method of claim 48.

50. A population of cells comprising the library of claim 49.

51. A recombinant hydrolase nucleic acid produced by the method of claim 48.

52. A cell comprising the nucleic acid of claim 51.

53. The method of claim 47, wherein the recursive recombination is performed in vitro.

54. The method of claim 47, wherein the recursive recombination is performed in vivo.

55. A method of producing a modified triazine hydrolase nucleic acid homologue comprising mutating a nucleic acid of claim 1 or 4.

56. The modified hydrolase nucleic acid homologue produced by the method of claim 55.

57. A computer or computer readable medium comprising a database comprising a sequence record comprising one or more character string corresponding to a nucleic acid or protein sequence selected from SEQ ID NO: 1 to SEQ ID NO: 608.

58. An integrated system comprising a computer or computer readable medium comprising a database comprising one or more sequence records, each comprising one or more character strings corresponding to a nucleic acid or protein sequence selected from SEQ ID NO: 1 to SEQ ID NO: 608, the integrated system further comprising a user input interface allowing a user to selectively view one or more sequence record.

59. The integrated system of claim 58, the computer or computer readable medium comprising an alignment instruction set which aligns the character strings with one or more additional character string corresponding to a nucleic acid or protein sequence.

60. The integrated system of claim 59, wherein the instruction set comprises one or more of: a local homology comparison determination, a homology alignment determination, a search for similarity determination, and a BLAST determination.

61. The integrated system of claim 59, further comprising a user readable output element which displays an alignment produced by the alignment instruction set.

62. The integrated system of claim 58, the computer or computer readable medium further comprising an instruction set which translates one or more nucleic acid sequence comprising a sequence selected from SEQ ID NO: 1 to SEQ ID NO: 48, into an amino acid sequence.

63. The integrated system of claim 58, the computer or computer readable medium further comprising an instruction set for reverse-translating one or more amino acid sequence comprising a sequence selected from SEQ ID NO: 49-608, into a nucleic acid sequence.

64. The integrated system of claim 63, wherein the instruction set selects the nucleic acid sequence by applying a codon usage instruction set or an instruction set which determines sequence identity to a test nucleic acid sequence.

65. A method of using a computer system to present information pertaining to at least one of a plurality of sequence records stored in a database, said sequence records each comprising one or more character string corresponding to SEQ ID NO: 1 to SEQ ID NO: 608, the method comprising:
determining a list of one or more character strings corresponding to one or more of SEQ ID NO: 1 to SEQ ID NO: 608 or a subsequence thereof;
determining which character strings of said list are selected by a user; and,
displaying the selected character strings, or aligning the selected character strings with an additional character string.

66. The method of claim 65, further comprising displaying an alignment of the selected character string with the additional character string.

67. The method of claim 65, further comprising displaying the list.

68. A nucleic acid which comprises a unique subsequence in a nucleic acid selected from SEQ ID NO: 1 to SEQ ID NO: 48, wherein the unique subsequence is unique as compared to a nucleic acid corresponding to U55933 or AF312304.

69. A polypeptide which comprises a unique subsequence in a polypeptide selected from: SEQ ID NO: 49-608, wherein the unique subsequence is unique as compared to a polypeptide corresponding to U55933 or AF312304.

70. A target nucleic acid which hybridizes under stringent conditions to a unique coding oligonucleotide which encodes a unique subsequence in a polypeptide selected from: SEQ ID NO: 49-608, wherein the unique subsequence is unique as compared to a polypeptide corresponding to U55933 or AF312304.

71. The nucleic acid of claim 70, wherein the stringent conditions are selected such that a perfectly complementary oligonucleotide to the coding oligonucleotide hybridizes to the coding oligonucleotide with at least a 5× higher signal to noise ratio than for hybridization of the perfectly complementary oligonucleotide to a control nucleic acid corresponding to U59933, wherein the target nucleic acid hybridizes to the unique coding oligonucleotide with at least a 2× higher signal to noise ratio as compared to hybridization of the control nucleic acid to the coding oligonucleotide.

72. A nucleic acid encoding a triazine hydrolase polypeptide, which triazine hydrolase polypeptide is at least about 70% identical to the polypeptide of SEQ ID NO: 49, wherein the polypeptide comprises a leucine or a phenylalanine at position 84, a leucine or an alanine at position 92, a glutamic acid at position 125, a threonine at position 217, a threonine at position 219, an isoleucine or leucine at position 253, a glycine or a tryptophan at position 255, an asparagine or an aspartic acid at position 328, and a cysteine or a serine at position 331 and wherein the polypeptide is unique as compared to the polypeptide encoded by nucleic acid U55933 or AF312304.

73. A polypeptide that is at least about 70% identical to the polypeptide of SEQ ID NO: 49, wherein the polypeptide comprises a leucine or a phenylalanine at position 84, a leucine or an alanine at position 92, a glutamic acid at position 125, a threonine at position 217, a threonine at position 219, an isoleucine or leucine at position 253, a glycine or a tryptophan at position 255, an asparagine or an aspartic acid at position 328, and a cysteine or a serine at position 331 and wherein the polypeptide is unique as compared to the polypeptide encoded by the nucleic acid U55933 or AF312304.

74. A polypeptide, which polypeptide is at least about 70% identical to SEQ ID NO: 49, and comprises a unique amino acid at positions 84, 92, 125, 217, 219, 253, 255, 328, and 331 as compared to the polypeptide encoded by nucleic acid U55933 or AF312304.

75. A nucleic acid encoding a polypeptide, which polypeptide is at least about 70% identical to SEQ ID NO: 49, and comprises a unique amino acid at positions 84, 92, 125, 217, 219, 253, 255, 328, and 331 as compared to the polypeptide encoded by nucleic acid U55933 or AF312304.

76. An isolated or recombinant polypeptide comprising a modified SEQ ID NO:49, which modified SEQ ID NO: 49 comprises one or more modification selected from: L₈₄, L₉₂, D₁₂₅, I₂₁₇, P₂₁₉, L₂₅₃, W₂₅₅, D₃₂₈, and C₃₃₁.

77. The polypeptide of claim 76, wherein the polypeptide comprises atrazine hydrolase activity.

78. The polypeptide of claim 77, wherein the modified SEQ ID NO:49 comprises a set of modifications selected from:
(a) L₉₂, E₁₂₅, T₂₁₇, P₂₁₉, L₂₅₃, W₂₅₅, and S₃₃₁;
(b) L₉₂, E₁₂₅, T₂₁₇, P₂₁₉, L₂₅₃, G₂₅₅, and S₃₃₁;
(c) V₉₂, E₁₂₅, T₂₁₇, P₂₁₉, L₂₅₃, W₂₅₅, and S₃₃₁;
(d) V₉₂, E₁₂₅, T₂₁₇, P₂₁₉, L₂₅₃, G₂₅₅, and S₃₃₁;
(e) L₉₂, E₁₂₅, T₂₁₇, P₂₁₉, I₂₅₃, W₂₅₅, and S₃₃₁;
(f) L₉₂, E₁₂₅, T₂₁₇, P₂₁₉, I₂₅₃, G₂₅₅, and S₃₃₁;
(g) V₉₂, E₁₂₅, I₂₁₇, P₂₁₉, L₂₅₃, W₂₅₅, and S₃₃₁;
(h) V₉₂, E₁₂₅, I₂₁₇, P₂₁₉, L₂₅₃, G₂₅₅, and S₃₃₁;
(i) L₉₂, D₁₂₅, T₂₁₇, P₂₁₉, L₂₅₃, G₂₅₅, and S₃₃₁;
(j) V₉₂, E₁₂₅, T₂₁₇, P₂₁₉, L₂₅₃, W₂₅₅, and C₃₃₁;
(k) V₉₂, E₁₂₅, T₂₁₇, P₂₁₉, L₂₅₃, G₂₅₅, and C₃₃₁;
(l) V₉₂, E₁₂₅, T₂₁₇, P₂₁₉, I₂₅₃, W₂₅₅, and S₃₃₁;
(m) L₉₂, E₁₂₅, T₂₁₇, T₂₁₉, L₂₅₃, W₂₅₅, and S₃₃₁;
(n) V₉₂, E₁₂₅, T₂₁₇, P₂₁₉, I₂₅₃, G₂₅₅, and S₃₃₁;
(o) L₉₂, E₁₂₅, T₂₁₇, T₂₁₉, L₂₅₃, G₂₅₅, and S₃₃₁;
(p) V₉₂, D₁₂₅, T₂₁₇, P₂₁₉, L₂₅₃, W₂₅₅, and S₃₃₁;
(q) V₉₂, D₁₂₅, T₂₁₇, P₂₁₉, L₂₅₃, G₂₅₅, and S₃₃₁;
(r) V₉₂, E₁₂₅, T₂₁₇, T₂₁₉, L₂₅₃, W₂₅₅, and S₃₃₁; and,
(s) V₉₂, E₁₂₅, T₂₁₇, T₂₁₉, L₂₅₃, G₂₅₅, and S₃₃₁.

79. The polypeptide of claim 78, comprising a sequence selected from from: SEQ ID NO: 97: to SEQ ID NO: 608.

80. The polypeptide of claim 76, comprising atratone activity.

81. The polypeptide of claim 80, comprising a set of modifications selected from:
(a) F₈₄, L₉₂, E₁₂₅, L₂₅₃, G₂₅₅, D₃₂₈, and C₃₃₁;
(b) F₈₄, L₉₂, E₁₂₅, I₂₅₃, G₂₅₅, D₃₂₈, and C₃₃₁;
(c) F₈₄, L₉₂, E₁₂₅, L₂₅₃, W₂₅₅, D₃₂₈, and C₃₃₁;
(d) F₈₄, L₉₂, E₁₂₅, I₂₅₃, W₂₅₅, D₃₂₈, and C₃₃₁;
(e) L₈₄, L₉₂, E₁₂₅, L₂₅₃, G₂₅₅, D₃₂₈, and C₃₃₁;
(f) L₈₄, L₉₂, E₁₂₅, I₂₅₃, G₂₅₅, D₃₂₈, and C₃₃₁;
(g) F₈₄, L₉₂, D₁₂₅, L₂₅₃, G₂₅₅, D₃₂₈, and C₃₃₁;
(h) F₈₄, L₉₂, D₁₂₅, I₂₅₃, G₂₅₅, D₃₂₈, and C₃₃₁;
(i) L₈₄, L₉₂, E₁₂₅, L₂₅₃, W₂₅₅, D₃₂₈, and C₃₃₁;
(j) L₈₄, L₉₂, E₁₂₅, I₂₅₃, W₂₅₅, D₃₂₈, and C₃₃₁;
(k) F₈₄, L₉₂, D₁₂₅, L₂₅₃, W₂₅₅, D₃₂₈, and C₃₃₁;
(l) F₈₄, L₉₂, D₁₂₅, I₂₅₃, W₂₅₅, D₃₂₈, and C₃₃₁;
(m) L₈₄, L₉₂, D₁₂₅, L₂₅₃, G₂₅₅, D₃₂₈, and C₃₃₁;
(n) L₈₄, L₉₂, D₁₂₅, I₂₅₃, G₂₅₅, D₃₂₈, and C₃₃₁;
(o) L₈₄, L₉₂, D₁₂₅, L₂₅₃, W₂₅₅, D₃₂₈, and C₃₃₁; and,
(p) L₈₄, L₉₂, D₁₂₅, I₂₅₃, W₂₅₅, D₃₂₈, and C₃₃₁.

82. The polypeptide of claim 81, comprising a sequence selected from from: SEQ ID NO: 97: to SEQ ID NO: 608.

83. A polypeptide, which polypeptide is at least about 70% identical to SEQ ID NO: 49, and comprises a unique amino acid at positions 84 and 92, as compared to the polypeptide encoded by nucleic acid U55933 or AF312304.

84. A nucleic acid encoding a polypeptide, which polypeptide is at least about 70% identical to SEQ ID NO: 49, and comprises a unique amino acid at positions 84 and 92 as compared to nucleic acid U55933 or AF312304.

85. A polypeptide, which polypeptide is at least about 70% identical to the polypeptide encoded by nucleic acid U55933 or AF312304, and comprises a unique amino acid at positions 84 and 92, as compared to the polypeptide encoded by nucleic acid U55933 or AF312304.

86. A nucleic acid encoding a polypeptide, which polypeptide is at least about 70% identical to the polypeptide encoded by nucleic acid U55933 or AF312304 and which polypeptide comprises a unique amino acid at positions 84 and 92, as compared to the polypeptide encoded by nucleic acid U55933 or AF312304.

87. The polypeptide of claim 83 or claim 85, further comprising an asparagine at position 328 and a serine at position 331

88. The nucleic acid of claim 84 or claim 86, wherein the polypeptide further comprises an asparagine at position 328 and a serine at position 331

The application's sequence listing, which the Patent Office published only in electronic form, follows.

SEQUENCE LISTING (611 sequences)

SEQ ID NO: 1 - DNA, 1425 bp, Artificial Sequence
  Description of Artificial Sequence: Synthetic oligonucleotide
atgcaaacgctcagcatccagcacggtaccctcgtcacgatggatcagtaccgcagagtccttggggatagctgggtccacgtgcaggatggacggatcgtcgcgctcggagtgcacgccgagtcggtgcctccgccagcggatcgggtgatcgatgcacgcggcaaggtcgtgttacccggtttcatcaatgcccacacccatgtgaaccagatcctcctgcgcggagggccctcgcacgggcgtcaactctatgactggctgttcaacgttgtgtatccgggacaaagggcgatgagaccggaggacgtagcggtggcggtgaggttgtattgtgcggaagctgtgcgcagcgggattacgacgatcaacgaaaacgccgattcggccatctacccaggcaacatcgaggccgcgatggcggtctatggtgaggtgggtgtgagggtcgtctacgcccgcatgttctttgatcggatggacgggcgcattcaagggtatgtggacgccttgaaggctcgctctccccaagtcgaactgtgctcgatcatggaggaaacggctgtggccaaagatcggatcacagccctgtcagatcagtatcatggcacggcaggaggtcgtatatcagtttggcccgctcctgccactaccacggcggtgacagttgaaggaatgcgatgggcacaagccttcgcccgtgatcgggcggtaatgtggacgcttcacatggcggagagcgatcatgatgagcggcttcattggatgagtcccgccgagtacatggagtgttacggactcttggatgagcgtctgcaggtcgcgcattgcgtgtactttgaccggaaggatgttcggctgctgcaccgccacaatgtgaaggtcgcgtcgcaggttgtgagcaatgcctacctcggctcaggggtggcccccgtgccagagatggtggagcgcggcatggccgtgggcattggaacagataacgggaatagtaatgactccgtaaacatgatcggagacatgaagtttatggcccatattcaccgcgcggtgcatcgggatgcggacgtgctgaccccagagaagattcttgaaatggcgacgatcgatggggcgcgttcgttgggaatggaccacgagattggttccatcgaaaccggcaagcgcgcggaccttatcctgcttgacctgcgtcaccctcagacgactcctcaccatcatttggcggccacgatcgtgtttcaggcttacggcaatgaggtggacactgtcctgattgacggaaacgttgtgatggagaaccgccgcttgagctttcttccccctgaacgtgagttggcgttccttgaggaagcgcagagccgcgccacagctattttgcagcgggcgaacatggtggctaacccagcttggcgcagcctctag

SEQ ID NO: 2 - DNA, 1425 bp, Artificial Sequence
  Description of Artificial Sequence: Synthetic oligonucleotide
atgcaaacgctcagcatccagcacggtaccctcgtcacgatggatcagtaccgcagagtccttggggatagctgggttcacgtgcaggatggacggatcgtcgcgctcggagtgcacgccgagtcggtgcctccgccagcggatcgggtgatcgatgcacgcggcaaggtcgtgttacccggtttcatcaatgcccacacccatgtgaaccagatcctcctgcgcggagggccctcgcacgggcgtcaattctatgactggctgttcaacgttgtgtatccgggacaaaaggcgatgagaccggaggacgtagcggtggcggtgaggttgtattgtgcggaagctgtgcgcagcgggattacgacgatcaacgaaaacgccgattcggccatctacccaggcaacatcgaggccgcgatggcggtctatggtgaggtgggtgtgagggtcgtctacgcccgcatgttctttgatcggatggacgggcgcattcaagggtatgtggacgccttgaaggctcgctctccccaagtcgaactgtgctcgatcatggaggaaacggctgtggccaaagatcggatcacagccctgtcagatcagtatcatggcacggcaggaggtcgtatatcagtttggcccgctcctgccactaccacggcggtgacagttgaaggaatgcgatgggcacaagccttcgcccgtgatcgggcggtaatgtggacgcttcacatggcggagagcgatcatgatgagcggcttcattggatgagtcccgccgagtacatggagtgttacggactcttggatgagcgtctgcaggtcgcgcattgcgtgtactttgaccggaaggatgttcggctgctgcaccgccacaatgtgaaggtcgcgtcgcaggttgtgagcaatgcctacctcggctcaggggtggcccccgtgccagagatggtggagcgcggcatggccgtgggcattggaacagataacgggaatagtaatgactccgtaaacatgatcggagacatgaagtttatggcccatattcaccgcgcggtgcatcgggatgcggacgtgctgaccccagagaagattcttgaaatggcgacgatcgatggggcgcgttcgttgggaatggaccacgagattggttccatcgaaaccggcaagcgcgcggaccttatcctgcttgacctgcgtcaccctcagacgactcctcaccatcatttggcggccacgatcgtgtttcaggcttacggcaatgaggtggacactgtcctgattgacggaaacgttgtgatggagaaccgccgcttgagctttcttccccctgaacgtgagttggcgttccttgaggaagcgcagagccgcgccacagctattttgcagcgggcgaacatggtggctaacccagcttggcgcagcctctag

SEQ ID NO: 3 - DNA, 1425 bp, Artificial Sequence
  Description of Artificial Sequence: Synthetic oligonucleotide
atgcaaacgctcagcatccagcacggtaccctcgtcacgatggatcagtaccgcagagtccttggggatagctgggttcacgtgcaggatggacggatcgtcgcgctcggagtgcacgccgagtcggtgcctccgccagcggatcgggtgatcgatgcacgcggcaaggtcgtgttacccggtttcatcaatgcccacacccatgtgaaccagatcctcctgcgcggagggccctcgcacgggcgtcaactctatgactggctgttcaacgttttgtatccgggacaaaaggcgatgagaccggaggacgtagcggtggcggtgaggttgtattgtgcggaagctgtgcgcagcgggattacgacgatcaacgaaaacgccgattcggccatctacccaggcaacatcgaggccgcgatggcggtctatggtgaggtgggtgtgagggtcgtctacgcccgcatgttctttgatcggatggacgggcgcattcaagggtatgtggacgccttgaaggctcgctctccccaagtcgaactgtgctcgatcatggaggaaacggctgtggccaaagatcggatcacagccctgtcagatcagtatcatggcacggcaggaggtcgtatatcagtttggcccgctcctgccactaccacggcggtgacagttgaaggaatgcgatgggcacaagccttcgcccgtgatcgggcggtaatgtggacgcttcacatggcggagagcgatcatgatgagcggcttcattggatgagtcccgccgagtacatggagtgttacggactcttggatgagcgtctgcaggtcgcgcattgcgtgtactttgaccggaaggatgttcggctgctgcaccgccacaatgtgaaggtcgcgtcgcaggttgtgagcaatgcctacctcggctcaggggtggcccccgtgccagagatggtggagcgcggcatggccgtgggcattggaacagatgacgggaatagtaatgactccgtaaacatgatcggagacatgaagtttatggcccatattcaccgcgcggtgcatcgggatgcggacgtgctgaccccagagaagattcttgaaatggcgacgatcgatggggcgcgttcgttgggaatggaccacgagattggttccatcgaaaccggcaagcgcgcggaccttatcctgcttgacctgcgtcaccctcagacgactcctcaccatcatttggcggccacgatcgtgtttcaggcttacggcaatgaggtggacactgtcctgattgacggaaacgttgtgatggagaaccgccgcttgagctttcttccccctgaacgtgagttggcgttccttgaggaagcgcagagccgcgccacagctattttgcagcgggcgaacatggtggctaacccagcttggcgcagcctctag

SEQ ID NO: 4 - DNA, 1425 bp, Artificial Sequence; identical to SEQ ID NO: 2
  Description of Artificial Sequence: Synthetic oligonucleotide

SEQ ID NO: 5 - DNA, 1425 bp, Artificial Sequence
  Description of Artificial Sequence: Synthetic oligonucleotide
atgcaaacgctcagcatccagcacggtaccctcgtcacgatggatcagtaccgcagagtccttggtgatagctgggttcacgtgcaggatggacggatcgtcgcgctcggagtgcacgccgagtcggtgcctccgccagcggatcgggtgatcgatgcacgcggcaaggtcgtgttacccggtttcatcaatgcccacacccatgtgaaccagatcctcctgcgcggagggccctcgcacgggcgtcaactctatgactggctgttcaacgttgtgtatccgggacaaaaggcgatgagaccggaggacgtagcggtggcggtgaggttgtattgtgcggaagctgtgcgcagcgggattacgacgatcaacgaaaacgccgattcggccatctacccaggcaacatcgaggccgcgatggcggtctatggtgaggtgggtgtgagggtcgtctacgcccgcatgttctttgatcggatggacgggcgcattcaagggtatgtggacgccttgaaggctcgctctccccaagtcgaactgtgctcgatcatggaggaaacggctgtggccaaagatcggatcacagccctgtcagatcagtatcatggcacggcaggaggtcgtatatcagtttggcccgctcctgccactaccacggcggtgacagttgaaggaatgcgatgggcacaagccttcgcccgtgatcgggcggtaatgtggacgcttcacatggcggagagcgatcatgatgagcggcttcattggatgagtcccgccgagtacatggagtgttatggactcttggatgagcgtctgcaggtcgcgcattgcgtgtactttgaccggaaggatgttcggctgctgcaccgccacaatgtgaaggtcgcgtcgcaggttgtgagcaatgcctacctcggctcaggggtggcccccgtgccagagatggtggagcgcggcatggccgtgggcattggaacagataacgggaatagtaatgactccgtaaacatgatcggagacatgaagtttatggcccatattcaccgcgcggtgcatcgggatgcggacgtgctgaccccagagaagattcttgaaatggcgacgatcgatggggcgcgttcgttgggaatggaccacgagattggttccatcgaaaccggcaagcgcgcggaccttatcctgcttgacctgcgtcaccctcagacgactcctcaccatcatttggcggccacgatcgtgtttcaggcttacggcaatgaggtggacactgtcctgattgacggaaacgttgtgatggagaaccgccgcttgagctttcttccccctgaacgtgagttggcgttccttgaggaagcgcagagccgcgccacagctattttgcagcgggcgaacatggtggctaacccagcttggcgcagcctctag

SEQ ID NO: 6 - DNA, 1425 bp, Artificial Sequence
  Description of Artificial Sequence: Synthetic oligonucleotide
atgcaaacgctcagcatccagcacggtaccctcgtcacgatggatcagtaccgcagagtccttggggatagctgggttcacgtgcaggatggacggatcgtcgcgctcggagtgcacgccgagtcggtgcctccgccagcggatcgggtgatcgatgcacgcggcaaggtcgtgttacccggtttcatcaatgcccacacccatgtgaaccagatcctcctgcgcggagggccctcgcacgggcgtcaactctatgactggctgttcaacgttgtgtatccgggacaaaaggcgatgagaccggaggacgtagcggtggcggtgaggttgtattgtgcggaagctgtgcgcagcgggattacgacgatcaacgaaaacgccgattcggccatctacccaggcaacatcgaggccgcgatggcggtctatggtgaggtgggtgtgagggtcgtctacgcccgcatgttctttgatcggatggacgggcgcattcaagggtatgtggacgccttgaaggctcgctctccccaagtcgaactgtgcccgatcatggaggaaacggctgtggccaaagatcggatcacagccctgtcagatcagtatcatggcacggcaggaggtcgtatatcagtttggcccgctcctgccactaccacggcggtgacagttgaaggaatgcgatgggcacaagccttcgcccgtgatcgggcggtaatgtggacgcttcacatggcggagagcgatcatgatgagcggcttcattggatgagtcccgccgagtacatggagtgttacggactcttggatgagcgtctgcaggtcgcgcattgcgtgtactttgaccggaaggatgttcggctgctgcaccgccacaatgtgaaggtcgcgtcgcaggttgtgagcaatgcctacctcggctcaggggtggcccccgtgccagagatggtggagcgcggcatggccgtgggcattggaacagataacgggaatagtaatgactccgtaaacatgatcggagacatgaagtttatggcccatattcaccgcgcggtgcatcgggatgcggacgtgctgaccccagagaagattcttgaaatggcgacgatcgatggggcgcgttcgttgggaatggaccacgagattggttccatcgaaaccggcaagcgcgcggaccttatcctgcttgacctgcgtcaccctcagacgactcctcaccatcatttggcggccacgatcgtgtttcaggcttacggcaatgaggtggacactgtcctgattgacggaaacgttgtgatggagaaccgccgcttgagttttcttccccctgaacgtgagttggcgttccttgaggaagcgcagagccgcgccacagctattttgcagcgggcgaacatggtggctaacccagcttggcgcagcctctag

SEQ ID NO: 7 - DNA, 1425 bp, Artificial Sequence
  Description of Artificial Sequence: Synthetic oligonucleotide
atgcaaacgctcagcatccagcacggtaccctcgtcacgatggatcagtaccgcagagtccttggggatagctgggttcacgtgcaggatggacggatcgtcgcgctcggagtgcacgccgagtcggtgcctccgccagcggatcgggtgatcgatgcacgcggcaaggtcgtgttacccggtttcatcaatgcccacacccatgtgaaccagatcctcctgcgcggagggccctcgcacgggcgtcaactctatgactggctgttcaacgttgtgtatccgggacaaaaggcgatgagaccggaggacgtagcggtggcggtgaggttgtattgtgcggaagctgtgcgcagcgggattacgacgatcaacgaaaacgccgattcggccatctacccaggcaacatcgaggccgcgatggcggtctatggtgaggtgggtgtgagggtcgtctacgcccgcatgttctttgatcggatggacgggcgcattcaagggtatgtggacgccttgaaggctcgctctccccaagtcgaactgtgctcgatcatggaggaaacggctgcggccaaagatcggatcacagccctgtcagatcagtatcatggcacggcaggaggtcgtatatcagtttggcccgctcctgccactaccacggcggtgacagttgaaggaatgcgatgggcacaagccttcgcccgtgatcgggcggtaatgtggacgcttcacatggcggagagcgatcatgatgagcggattcatgggatgagtcccgccgagtacatggagtgttacggactcttggatgagcgtctgcaggtcgcgcattgcgtgtactttgaccggaaggatgttcggctgctgcaccgccacaatgtgaaggtcgcgtcgcaggttgtgagcaatgcctacctcggctcaggggtggcccccgtgccagagatggtggagcgcggcatggccgtgggcattggaacagataacgggaatagtaatgactccgtaaacatgatcggagacatgaagtttatggcccatattcaccgcgcggtgcatcgggatgcggacgtgctgaccccagagaagattcttgaaatggcgacgatcgatggggcgcgttcgttgggaatggaccacgagattggttccatcgaaaccggcaagcgcgcggaccttatcctgcttgacctgcgtcaccctcagacgactcctcaccatcatttggcggccacgatcgtgtttcaggcttacggcaatgaggtggacactgtcctgattgacggaaacgttgtgatggagaaccgccgcttgagctttcttccccctgaacgtgagttggcgttccttgaggaagcgcagagccgcgccacagctattttgcagcgggcgaacatggtggctaacccagcttggcgcagcctctag

SEQ ID NO: 8 - DNA, 1425 bp, Artificial Sequence
  Description of Artificial Sequence: Synthetic oligonucleotide
atgcaaacgctcagcatccagcacggtaccctcgtcacgatggatcagtaccgcagagtccttggggatagctgggttcacgtgcaggatggacggatcgtcgcgctcggagtgcacgccgagtcggtgcctccgccagcggatcgggtgatcgatgcacgcggcaaggtcgtgttacccggtttcatcaatgcccacacccatgtgaaccagatcctcctgcgcggagggccctcgcacgggcgtcaattctatgactggctgttcaacgttgtgtatccgggacaaaaggcgatgagaccggaggacgtagcggtggcggtgaggttgtattgtgcggaagctgtgcgcagcgggattacgacgatcaacgacaacgccgattcggccatctacccaggcaacatcgaggccgcgatggcggtctatggtgaggtgggtgtgagggtcgtctacgcccgcatgttctttgatcggatggacgggcgcattcaagggtatgtggacgccttgaaggctcgctctccccaagtcgaactgtgctcgatcatggaggaaacggctgtggccaaagatcggatcacagccctgtcagatcagtatcatggcacggcaggaggtcgtatatcagtttggcccgctcctgccactaccacggcggtgacagttgaaggaatgcgatgggcacaagccttcgcccgtgatcgggcggtaatgtggacgcttcacatggcggagagcgatcatgatgagcggattcatgggatgagtcccgccgagtacatggagtgttacggactcttggatgagcgtctgcaggtcgcgcattgcgtgtactttgaccggaaggatgttcggctgctgcaccgccacaatgtgaaggtcgcgtcgcaggttgtgagcaatgcctacctcggctcaggggtggcccccgtgccagagatggtggagcgcggcatggccgtgggcattggaacagataacgggaatagtaatgactccgtaaacatgatcggagacatgaagtttatggcccatattcaccgcgcggtgcatcgggatgcggacgtgctgaccccagagaagattcttgaaatggcgacgatcgatggggcgcgttcgttgggaatggaccacgagattggttccatcgaaaccggcaagcgcgcggaccttatcctgcttgacctgcgtcaccctcagacgactcctcaccatcatttggcggccacgatcgtgtttcaggcttacggcaatgaggtggacactgtcctgattgacggaaacgttgtgatggagaaccgccgcttgagctttcttccccctgaacgtgagttggcgttccttgaggaagcgcagagccgcgccacagctattttgcagcgggcgaacatggtggctaacccagcttggcgcagcctctag

SEQ ID NO: 9 - DNA, 1425 bp, Artificial Sequence
  Description of Artificial Sequence: Synthetic oligonucleotide
atgcaaacgctcagcatccagcacggtaccctcgtcacgatggatcagtaccgcagagtccttggggatagctgggttcacgtgcaggatggacggatcgtcgcgctcggagtgcacgccgagtcggtgcctccgccagcggatcgggtgatcgatgcacgcggcaaggtcgtgttacccggtttcatcaatgcccacacccatgtgaaccagatcctcctgcgcggagggccctcgcacgggcgtcaactctatgactggctgttcaacgttgtgtatccgggacaaaaggcgatgagaccggaggacgtagcggtggcggtgaggttgtattgtgcggaagctgtgcgcagcgggattacgacgatcaacgaaaacgccgattcggccatctacccaggcaacatcgaggccgcgatggcggtctatggtgaggtgggtgtgagggtcgtctacgcccgcatgttctttgatcggatggacgggcgcattcaagggtatgtggacgccttgaaggctcgctctccccaagtcgaactgtgctcgatcatggaggaaacggctgtggccaaagatcggatcacagccctgtcagatcagtatcatggcacggcaggaggtcgtatatcagtttggcccgctcctgccactaccacggcggtgacagttgaaggaatgcgatgggcacaagccttcgcccgtgatcgggcggtaatgtggacgcttcacatggcggagagcgatcatgatgagcggcttcattggatgagtcccgccgagtacatggagtgttacggactcttggatgagcgtctgcaggtcgcgcattgcgtgtactttgaccggaaggatgttcggctgctgcaccgccacaatgtgaaggtcgcgtcgcaggttgtgagcaatgcctacctcggctcaggggtggcccccgtgccagagatggtggagcgcggcatggccgtgggcattggaacagataacgggaatagtaatgactccgtaaacatgatcggagacatgaagtttatggcccatattcaccgcgcggtgcatcgggatgcggacgtgctgaccccagagaagattcttgaaatggcgacgatcgatggggcgcgttcgttgggaatggaccacgagattggttccatcgaaaccggcaagcgcgcggaccttatcctgcttgacctgcgtcaccctcagacgactcctcaccatcatttggcggccacgatcgtgtttcaggcttacggcaatgaggtggacactgtcctgattgacggaaacgttgtgatggagaaccgccgcttgagctttcttccccctgaacgtgagttggcgttccttgaggaagcgcagagccgcgccacagctattttgcagcgggcgaacatggtggctaacccagcttggcgcagcctctag

SEQ ID NO: 10 - DNA, 1425 bp, Artificial Sequence
  Description of Artificial Sequence: Synthetic oligonucleotide
atgcaaacgctcagcatccagcacggtaccctcgtcacgatggatcagtaccgcagagtccttggggatagctgggttcacgtgcaggatggacggatcgtcgcgctcggagtgcacgccgagtcggtgcctccgccagcggatcgggtgatcgatgcacgcggcaaggtcgtgttacccggtttcatcaatgcccacacccatgtgaaccagatcctcctgcgcggagggccctcgcacgggcgtcaattctatgactggctgttcaacgttttgtatccgggacaaaaggcgatgagaccggaggacgtagcggtggcggtgaggttgtattgtgcggaagctgtgcgcagcgggattacgacgatcaacgaaaacgccgattcggccatctacccaggcaacatcgaggccgcgatggcggtctatggtgaggtgggtgtgagggtcgtctacgcccgtatgttctttgatcggatggacgggcgcattcaagggtatgtggacgccttgaaggctcgctctccccaagtcgaactgtgctcgatcatggaggaaacggctgtggccaaagatcggatcacagccctgtcagatcagtatcatggcacggcaggaggtcgtatatcagtttggcccgctcctgccattaccccggcggtgacagttgaaggaatgcgatgggcacaagccttcgcccgtgatcgggcggtaatgtggacgcttcacatggcggagagcgatcatgatgagcggcttcattggatgagtcccgccgagtacatggagtgttacggactcttggatgagcgtctgcaggtcgcgcattgcgtgtactttgaccggaaggatgttcggctgctgcaccgccacaatgtgaaggtcgcgtcgcaggttgtgagcaatgcctacctcggctcaggggtggcccccgtgccagagatggtggagcgcggcatggccgtgggcattggaacagatgacgggaattgtaatgactccgtaaacatgatcggagacatgaagtttatggcccatattcaccgcgcggtgcatcgggatgcggacgtgctgaccccagagaagattcttgaaatggcgacgatcgatggggcgcgttcgttgggaatggaccacgagattggttccatcgaaaccggcaagcgcgcggaccttatcctgcttgacctgcgtcaccctcagacgactcctcaccatcatttggcggccacgatcgtgtttcaggcttacggcaatgaggtggacactgtcctgattgacggaaacgttgtgatggagaaccgccgcttgagctttcttccccctgaacgtgagttggcgttccttgaggaagcgcagagccgcgccacagctattttgcagcgggcgaacatggtggctaacccagcttggcgcagcctctag

SEQ ID NO: 11 - DNA, 1425 bp, Artificial Sequence
  Description of Artificial Sequence: Synthetic oligonucleotide
atgcaaacgctcagcatccagcacggtaccctcgtcacgatggatcagtaccgcagagtccttggggatagctgggttcacgtgcaggatggacggatcgtcgcgctcggagtgcacgccgagtcggtgcctccgccagcggatcgggtgatcgatgcacgcggcaaggtcgtgttacccggtttcatcaatgcccacacccatgtgaaccagatcctcctgcgcggagggccctcgcacgggcgtcaactctatgactggctgttcaacgttttgtatccgggacaaaaggcgatgagaccggaggacgtagcggtggcggtgaggttgtattgtgcggaagctgtgcgcagcgggattacgacgatcaacgacaacgccgattcggccatctacccaggcaacatcgaggccgcgatggcggtctatggtgaggtgggtgtgagggtcgtctacgcccgcatgttctttgatcggatggacgggcgcattcaagggtatgtggacgccttgaaggctcgctctccccaagtcgaactgtgctcgatcatggaggaaacggctgtggccaaagatcggatcacagccctgtcagatcagtatcatggcacggcaggaggtcgtatatcagtttggcccgctcctgccactaccacggcggtgacagttgaaggaatgcgatgggcacaagccttcgcccgtgatcgggcggtaatgtggacgcttcacatggcggagagcgatcatgatgagcggcttcattggatgagtcccgccgagtacatggagtgttacggactcttggatgagcgtctgcaggtcgcgcattgcgtgtactttgaccggaaggatgttcggctgctgcaccgccacaatgtgaaggtcgcgtcgcaggttgtgagcaatgcctacctcggctcaggggtggcccccgtgccagagatggtggagcgcggcatggccgtgggcattggaacagatgacgggaatagtaatgactccgtaaacatgatcggagacatgaagtttatggcccatattcaccgcgcggtgcatcgggatgcggacgtgctgaccccagagaagattcttgaaatggcgacgatcgatggggcgcgttcgttgggaatggaccacgagattggttccatcgaaaccggcaagcgcgcggaccttatcctgcttgacctgcgtcaccctcagacgactcctcaccatcatttggcggccacgatcgtgtttcaggcttacggcaatgaggtggacactgtcctgattgacggaaacgttgtgatggagaaccgccgcttgagctttcttccccctgaacgtgagttggcgttccttgaggaagcgcagagccgcgccacagctattttgcagcgggcgaacatggtggctaacccagcttggcgcagcctctag

SEQ ID NO: 12 - DNA, 1425 bp, Artificial Sequence
  Description of Artificial Sequence: Synthetic oligonucleotide
atgcaaacgctcagcatccagcacggtaccctcgtcacgatggatcagtaccgcagagtccttggggatagctgggttcacgtgcaggatggacggatcgtcgcgctcggagtgcacgccgagtcggtgcctccgccagcggatcgggtgatcgatgcacgcggcaaggtcgtgttacccggtttcatcaatgcccacacccatgtgaaccagatcctcctgcgcggagggccctcgcacgggcgtcaattctatgactggctgttcaacgttgtgtatccgggacaaaaggcgatgagaccggaggacgtagcggtggcggtgaggttgtattgtgcggaagctgtgcgcagcgggattacgacgatcaacgaaaacgccgattcggccatctacccaggcaacatcgaggccgcgatggcggtctatggtgaggtgggtgtgagggtcgtctacgcccgcatgttctttgatcggatggacgggcgcattcaagggtatgtggacgccttggaggctcgctctccccaagtcgaactgtgctcgatcatggaggaaacggctgtggccaaagatcggatcacagccctgtcagatcagtatcatggcacggcaggaggtcgtatatcagtttggcccgctcctgccactaccacggcggtgacagttgaaggaatgcgatgggcacaagccttcgcccgtgatcgggcggtaatgtggacgcttcacatggcggagagcgatcatgatgagcggcttcattggatgagtcccgccgagtacatggagtgttacggactcttggatgagcgtctgcaggtcgcgcattgcgtgtactttgaccggaaggatgttcggctgccgcaccgccacaatgtgaaggtcgcgtcgcaggttgtgagcaatgcctacctcggctcaggggtggcccccgtgccagagatggtggagcgcggcatggccgtgggcattggaacagataacgggaatagtaatgactccgtaaacatgatcggagacatgaagtttatggcccatattcaccgcgcggtgcatcgggatgcggacgtgctgaccccagagaagattcttgaaatggcgacgatcgatggggcgcgttcgttgggaatggaccacgagattggttccatcgaaaccggcaagcgcgcggaccttatcctgcttgacctgcgtcaccctcagacgactcctcaccatcatttggcggccacgatcgtgtttcaggcttacggcaatgaggtggacactgtcctgattgacggaaacgttgtgatggagaaccgccgcttgagctttcttccccctgaacgtgagttggcgttccttgaggaagcgcagagccgcgccacagctattttgcagcgggcgaacatggtggctaacccagcttggcgcagcctctag

SEQ ID NO: 13 - DNA, 1425 bp, Artificial Sequence
  Description of Artificial Sequence: Synthetic oligonucleotide
atgcaaacgctcagcatccagcacggtaccctcgtcacgatggatcagtaccgcagagtccttggggatagctgggttcacgtgcaggatggacggatcgtcgcgctcggagtgcacgccgagtcggtgcctccgccagcggatcgggtgatcgatgcacgcggcaaggtcgtgttacccggtttcatcaatgcccacacccatgtgaaccagatcctcctgcgcggagggccctcgcacgggcgtcaattctatgactggctgttcaacgttgtgtatccgggacaaaaggcgatgagaccggaggacgtagcggtggcggtgaggttgtattgtgcggaagctgtgcgcagcgggattacgacgatcaacgaaaacgccgattcggccatctacccaggcaacatcgaggccgcgatggcggtctatggtgaggtgggtgtgagggtcgtctacgcccgcatgttctttgatcggatggacgggcgcattcaagggtatgtggacgccttgaaggctcgctctccccaagtcgaactgtgctcgatcatggaggaaacggctgtggccaaagatcggatcacagccctgtcagatcagtatcatggcacggcaggaggtcgtatatcagtttggcccgctcctgccactaccacggcggtgacagttgaaggaatgcgatgggcacaagccttcgcccgtgatcgggcggtaatgtggacgcttcacatggcggagagcgatcatgatgagcggattcatgggatgagtcccgccgagtacatggagtgttacggactcttggatgagcgtctgcaggtcgcgcattgcgtgtactttgaccggaaggatgttcggctgctgcaccgccacaatgtgaaggtcgcgtcgcaggttgtgagcaatgcctatctcggctcaggggtggcccccgtgccagagatggtggagcgcggcatggccgtgggcattggaacagatgacgggaattgtaatgactccgtaaacatgatcggagacatgaagtttatggcccatattcaccgcgcggtgcatcgggatgcggacgtgctgaccccagagaagattcttgaaatggcgacgatcgatggggcgcgttcgttgggaatggaccacgagattggttccatcgaaaccggcaagcgcgcggaccttatcctgcttgacctgcgtcaccctcagacgactcctcaccatcatttggcggccacgatcgtgtttcaggcttacggcaatgaggtggacactgtcctgattgacggaaacgttgtgatggagaaccgccgcttgagctttcttccccctgaacgtgagttggcgttccttgaggaagcgcagagccgcgccacagctattttgcagcgggcgaacatggtggctaacccagcttggcgcagcctctag

SEQ ID NO: 14 - DNA, 1425 bp, Artificial Sequence
  Description of Artificial Sequence: Synthetic oligonucleotide
atgcaaacgctcagcatccagcacggtaccctcgtcacgatggatcagtaccgcagagtccttggggatagctgggttcacgtgcaggatggacggatcgtcgcgctcggagtgcacgccgagtcggtgcctccgccggcggatcgggtgatcgatgcacgcggcaaggtcgtgttacccggtttcatcaatgcccacacccatgtgaaccagatcctcctgcgcggagggccctcgcacgggcgtcaattctatgactggctgttcaacgttgtgtatccgggacaaaaggcgatgagaccggaggacgtagcggtggcggtgaggttgtattgtgcggaagctgtgcgcagcgggattacgacgatcaacgaaaacgccgattcggccatctacccaggcaacatcgaggccgcgatggcggtctatggtgaggtgggtgtgagggtcgtctacgcccgcatgttctttgatcggatggacgggcgcattcaagggtatgtggacgccttgaaggctcgctctccccaagtcgaactgtgctcgatcatggaggaaacggctgtggccaaagatcggatcacagccctgtcagatcagtatcatggcacggcaggaggtcgtatatcagtttggcccgctcctgccactaccacggcggtgacagttgaaggaatgcgatgggcacaagccttcgcccgtgatcgggcggtaatgtggacgcttcacatggcggagagcgatcatgatgagcggattcatgggatgagtcccgccgagtacatggagtgttacggactcttggatgagcgtctgcaggtcgcgcattgcgtgtactttgaccggaaggatgttcggctgctgcaccgccacaatgtgaaggtcgcgtcgcaggttgtgagcaatgcctacctcggctcaggggtggcccccgtgccagagatggtggagcgcggcatggccgtgggcattggaacagatgacgggaattgtaatgactccgtaaacatgatcggagacatgaagtttatggcccatattcaccgcgcggtgcatcgggatgcggacgtgctgaccccagagaagattcttgaaatggcgacgatcgatggggcgcgttcgttgggaatggaccacgagattggttccatcgaaaccggcaagcgcgcggaccttatcctgcttgacctgcgtcaccctcagacgactcctcaccatcatttggcggccacgatcgtgtttcaggcttacggcaatgaggtggacactgtcctgattgacggaaacgttgtgatggagaaccgccgcttgagctttcttccccctgaacgtgagttggcgttccttgaggaagcgcagagccgcgccacagctattttgcagcgggcgaacatggtggctaacccagcttggcgcagcctctag

SEQ ID NO: 15 - DNA, 1425 bp, Artificial Sequence
  Description of Artificial Sequence: Synthetic oligonucleotide
atgcaaacgctcagcatccagcacggtaccctcgtcacgatggatcagtaccgcagagtccttggggatagctgggttcacgtgcaggatggacggatcgtcgcgctcggagtgcacgccgagtcggtgcctccgccagcggatcgggtgatcgatgcacgcggcaaggtcgtgttacccggtttcatcaatgcccacacccatgtgaaccagatcctcctgcgcggagggccctcgcacgggcgtcaattctatgactggctgttcaacgttgtgtatccgggacaaaaggcgatgagaccggaggacgtagcggtggcggtgaggttgtattgtgcggaagctgtgcgcagcgggattacgacgatcaacgaaaacgccgattcggccatctacccaggcaacatcgaggccgcgatggcggtctatggtgaggtgggtgtgagggtcgtctacgcccgcatgttctttgatcggatggacgggcgcattcaagggtatgtggacgccttgaaggctcgctctccccaagtcgaactgtgctcgatcatggaggaaacggctgtggccaaagatcggatcacagccctgtcagatcagtatcatggcacggcaggaggtcgtatatcagtttggcccgctcctgccactaccacggcggtgacagttgaaggaatgcgatgggcacaagccttcgcccgtgatcgggcggtaatgtggacgcttcacatggcggaaagcgatcatgatgagcggcttcattggatgagtcccgccgagtacatggagtgttacggactcttggatgagcgtctgcaggtcgcgcattgcgtgtactttgaccggaaggatgttcggctgctgcaccgccacaatgtgaaggtcgcgtcgcaggttgtgagcaatgcctacctcggctcaggggtggcccccgtgccagagatggtggagcgcggcatggccgtgggcattggaacagatgacgggaattgtaatgactccgtaaacatgatcggagacatgaagtttatggcccatattcaccgcgcggtgcatcgggatgcggacgtgctgaccccagagaagattcttgaaatggcgacgatcgatggggcgcgttcgttgggaatggaccacgagattggttccatcgaaaccggcaagcgcgcggaccttgtcctgcttgacctgcgtcaccctcagacgactcctcaccatcatttggcggccacgatcgtgtttcaggcttacggcaatgaggtggacactgtcctgattgacggaaacgttgtgatggagaaccgccgcttgagctttcttccccctgaacgtgagttggcgttccttgaggaagcgcagagccgcgccacagctattttgcagcgggcgaacatggtggctaacccagcttggcgcagcctctag

SEQ ID NO: 16 - DNA, 1425 bp, Artificial Sequence
  Description of Artificial Sequence: Synthetic oligonucleotide
atgcaaacgctcagcatccagcacggtaccctcgtcacgatggatcagtaccgcagagtccttggggatagctgggttcacgtgcaggatggacggatcgtcgcgctcggagtgcacgccgagtcggtgcctccgccagcggatcgggtgatcgatgcacgcggcaaggtcgtgttacccggtttcatcaatgcccacacccatgtgaaccagatcctcctgcgcggagggccctcgcacgggcgtcaattctatgactggctgttcaacgttgtgtatccgggacaaaaggcgatgagaccggaggacgtagcggtggcggtgaggttgtattgtgcggaagctgtgcgcagcgggattacgacgatcaacgaaaacgccgattcggccatctacccaggcaacatcgaggccgcgatggcggtctatggtgaggtgggtgtgagggtcgtctacgcccgcatgttctttgatcggatggacgggcgcattcaagggtatgtggacgccttgaaggctcgctctccccaagtcgaactgtgctcgatcatggaggaaacggctgtggccaaagatcggatcacagccctgtcagatcagtatcatggcacggcaggaggtcgtatatcagtttggcccgctcctgccactaccacggcggtgacagttgaaggaatgcgatgggcacaagccttcgcccgtgatcgggcggtaatgtggacgcttcacatggcggagagcgatcatgatgggcggcttcatgggatgagtcccgccgagtacatggagtgttacggactcttggatgagcgtctgcaggtcgcgcattgcgtgtactttgaccggaaggatgttcggctgctgcaccgccacaatgtgaaggtcgcgtcgcaggttgtgagcaatgcctacctcggctcaggggtggcccccgtgccagagatggtggagcgcggcatggccgtgggcattggaacagataacgggaatagtaatgactccgtaaacatgatcggagacatgaagtttatggcccatattcaccgcgcggtgcatcgggatgcggacgtgctgaccccagagaagattcttgaaatggcgacgatcgatggggcgcgttcgttgggaatggaccacgagattggttccatcgaaaccggcaagcgcgcggaccttatcctgcttgacctgcgtcaccctcagacgactcctcaccatcatttggcggccacgatcgtgtttcaggcttacggcaatgaggtggacactgtcctgattgacggaaacgttgtgatggagaaccgccgcttgagctttcttccccctgaacgtgagttggcgttccttgaggaagcgcagagccgcgccacagctattttgcagcgggcgaacatggtggctaacccagcttggcgcagcctctag

SEQ ID NO: 17 - DNA, 1425 bp, Artificial Sequence
  Description of Artificial Sequence: Synthetic oligonucleotide
atgcaaacgctcagcatccagcacggtaccctcgtcacgatggatcagtaccgcagagtccttggggatagctgggttcacgtgcaggatggacggatcgtcgcgctcggagtgcacgccgagtcggtgcctccgccagcggatcgggtgatcgatgcacgcggcaaggtcgtgttacccggtttcatcaatgcccacacccatgtgaaccagatcctcctgcgcggagggccctcgcacgggcgtcaactctatgactggctgttcaacgttttgtatccgggacaaaaggcgatgagaccggaggacgtagcggtggcggtgaggttgtattgtgcggaagctgtgcgcagcgggattacgacgatcaacgaaaacgccgattcggccatctacccaggcaacatcgaggccgcgatggcggtctatggtgaagtgggtgtgagggtcgtctacgcccgcatgttctttgatcggatggacgggcgcattcaagggtatgtggacgccttgaaggctcgctctccccaagtcgaactgtgctcgatcatggaggaaacggctgtggccaaagatcggatcacagccctgtcagatcagtatcatggcacggcaggaggtcgtatatcagtttggcccgctcctgccactaccacggcggtgacagttgaaggaatgcgatgggcacaagccttcgcccgtgatcgggcggtaatgtggacgcttcacatggcggagagcgatcatgatgagcggcttcattggatgagtcccgccgagtacatggagtgttacggactcttggatgagcgtctgcaggtcgcgcattgcgtgtactttgaccggaaggatgttcggctgctgcaccgccacaatgtgaaggtcgcgtcgcaggttgtgagcaatgcctacctcggctcaggggtggcccccgtgccagagatggtggagcgcggcatggccgtgggcattggaacagatgacgggaattgtaatgactccgtaaacatgatcggagacatgaagtttatggcccatattcaccgcgcggtgcatcgggatgcggacgtgctgaccccagagaagattcttgaaatggcgacgatcgatggggcgcgttcgttgggaatggaccacgagattggttccatcgaaaccggcaagcgcgcggaccttatcctgcttgacctgcgtcaccctcagacgactcctcaccatcatttggcggccacgatcgtgtttcaggcttacggcaatgaggtggacactgtcctgattgacggaaacgttgtgatggagaaccgccgcttgagctttcttccccctgaacgtgagttggcgttccttgaggaagcgcagagccgcgccacagctattttgcagcgggcgaacatggtggctaacccagcttggcgcagcctctag

SEQ ID NO: 18 - DNA, 1425 bp, Artificial Sequence
  Description of Artificial Sequence: Synthetic oligonucleotide
atgcaaacgctcagcatccagcacggtaccctcgtcacgatggatcagtaccgcagagtccttggggatagctgggttcacgtgcaggatggacggatcgtcgcgctcggagtgcacgccgagtcggtgcctccgccagcggatcgggtgatcgatgcacgcggcaaggtcgtgttacccggtttcatcaatgcccacacccatgtgaaccagatcctcctgcgcggagggccctcgcacgggcgtcaattctatgactggctgttcaacgttttgtatccgggacaaaaggcgatgagaccggaggacgtagcggtggcggtgaggttgtattgtgcggaagctgtgcgcagcgggattacgacgatcaacgaaaacgccgattcggccatctacccaggcaacatcgaggccgcgatggcggtctatggtgaggtgggtgtgagggtcgtctacgcccgcatgttctttgatcggatggacgggcgcattcaagggtatgtggacgccttgaaggctcgctctccccaagtcgaactgtgctcgatcatggaggaaacggctgtggccaaagatcggatcacagccctgtcagatcagtatcatggcacggcaggaggtcgtatatcagtttggcccgctcctgccactaccacggcggtgacagttgaaggaatgcgatgggcacaagccttcgcccgtgatcgggcggtaatgtggacgcttcacatggcggagagcgatcatgatgagcggattcatgggatgagtcccgccgagtacatggagtgttacggactcttggatgagcgtctgcaggtcgcgcattgcgtgtactttgaccggaaggatgttcggctgctgcaccgccacaatgtgaaggtcgcgtcgcaggttgtgagcaatgcctacctcggctcaggggtggcccccgtgccagagatggtggagcgcggcatggccgtgggcattggaacagatgacgggaattgtaatgactccgtaaacatgatcggagacatgaagtttatggcccatattcaccgcgcggtgcatcgggatgcggacgtgctgaccccagagaagattcttgaaatggcgacgatcgatggggcgcgttcgttgggaatggaccacgagattggttccatcgaaaccggcaagcgcgcggaccttatcctgcttgacctgcgtcaccctcagacgactcctcaccatcatttggcggccacgatcgtgtttcaggcttacggcaatgaggtggacactgtcctgattgacggaaacgttgtgatggagaaccgccgcttgagctttcttccccctgaacgtgagttggcgttccttgaggaagcgcagagccgcgccacagctattttgcagcgggcgaacatggtggctaacccagcttggcgcagcctctag

SEQ ID NO: 19 - DNA, 1425 bp, Artificial Sequence
  Description of Artificial Sequence: Synthetic oligonucleotide
atgcaaacgctcagcatccagcacggtaccctcgtcacgatggatcagtaccgcagagtccttggggatagctgggttcacgtgcaggatggacggatcgtcgcgctcggagtgcacgccgagtcggtgcctccgccagcggatcgggtgatcgatgcacgcggcaaggtcgtgttacccggtttcatcaatgcccacacccatgtgaaccagatcctcctgcgcggagggccctcgcacgggcgtcaattctatgactggctgttcaacgttttgtatccgggacaaaaggcgatgagaccggaggacgtagcggtggcggtgaggttgtattgtgcggaagctgtgcgcagcgggattacgacgatcaacgaaaacgccgattcggccatctacccaggcaacatcgaggccgcgatggcggtctatggtgaggtgggtgtgagggtcgtctacgcccgcatgttctttgatcggatggacgggcgcattcaagggtatgtggatgccttgaaggctcgctctccccaagtcgaactgtgctcgatcatggaggaaacggctgtggccaaagatcggatcacagccctgtcagatcagtatcatggcacggcaggaggtcgtatatcagtttggcccgctcctgccactaccacggcggtgacagttgaaggaatgcgatgggcacaagccttcgcccgtgatcgggcggtaatgtggacgcttcacatggcggagagcgatcatgatgagcggcttcattggatgagtcccgccgagtacatggagtgttacggactcttggatgagcgtctgcaggtcgcgcattgcgtgtactttgaccggaaggatgttcggctgctgcaccgccacaatgtgaaggtcgcgtcgcaggttgtgagcaatgcctacctcggctcaggggtggcccccgtgccagagatggtggagcgcggcatggccgtgggcattggaacagatgacgggaattgtaatgactccgtaaacatgatcggagacatgaagtttatggcccatattcaccgcgcggtgcatcgggatgcggacgtgctgaccccagagaagattcttgaaatggcgacgatcgatggggcgcgttcgttgggaatggaccacgagattggttccatcgaaaccggcaagcgcgcggaccttatcctgcttgacctgcgtcaccctcagacgactcctcaccatcatttggcggccacgatcgtgtttcaggcttacggcaatgaggtggacactgtcctgattgacggaaacgttgtgatggagaaccgccgcttgagctttcttccccctgaacgtgagttggcgttccttgaggaagcgcagagccgcgccacagctattttgcagcgggcgaacatggtggctaacccagcttggcgcagcctctag

SEQ ID NO: 20 - DNA, 1425 bp, Artificial Sequence
  Description of Artificial Sequence: Synthetic oligonucleotide
atgcaaacgctcagcatccagcacggtaccctcgtcacgatggatcagtaccgcagagtccttggggatagctgggttcacgtgcaggatggacggatcgtcgcgctcggagtgcacgccgagtcggtgcctccgccagcggatcgggtgatcgatgcacgcggcaaggtcgtgttacccggtttcatcaatgcccacacccatgtgaaccagatcctcctgcgcggagggccctcgcacgggcgtcaattctatgactggctgttcaacgttttgtatccgggacaaaaggcgatgagaccggaggacgtagcggtggcggtgaggttgtattgtgcggaagctgtgcgcagcgggattacgacgatcaacgagaacgccgattcggccatctacccaggcaacatcgaggccgcgatggcggtctatggtgaggtgggtgtgagggtcgtctacgcccgcatgttctttgatcggatggacgggcgcattcaagggtatgtggacgccttgaaggctcgctctccccaagtcgaactgtgctcgatcatggaggaaacggctgtggccaaagatcggatcacagccctgtcagatcagtatcatggcacggcaggaggtcgtatatcagtttggcccgctcctgccactaccacggcggtgacagttgaaggaatgcgatgggcacaagccttcgcccgtgatcgggcggtaatgtggacgcttcacatggcggagagcgatcatgatgagcggattcatgggatgagtcccgccgagtacatggagtgttacggactcttggatgagcgtctgcaggtcgcgcattgcgtgtactttgaccggaaggatgttcggctgctgcaccgccacaatgtgaaggtcgcgtcgcaggttgtgagcaatgcctacctcggctcaggggtggcccccgtgccagagatggtggagcgcggcatggccgtgggcattggaacagatgacgggaattgtaatgactccgtaaacatgatcggagacatgaagtttatggcccatattcaccgcgcggtgcatcgggatgcggacgtgctgaccccagagaagattcttgaaatggcgacgatcgatggggcgcgttcgttgggaatggaccacgagattggttccatcgaaaccggcaagcgcgcggaccttatcctgcttgacctgcgtcaccctcagacgactcctcaccatcatttggcggccacgatcgtgtttcaggcttacggcaatgaggtggacactgtcctgattgacggaaacgttgtgatggagaaccgccgcttgagctttcttccccctgaacgtgagttggcgttccttgaggaagcgcagagccgcgccacagctattttgcagcgggcgaacatggtggctaacccagcttggcgcagcctctag

SEQ ID NO: 21 - DNA, 1425 bp, Artificial Sequence
  Description of Artificial Sequence: Synthetic oligonucleotide
atgcaaacgctcagcatccagcacggtaccctcgtcacgatggatcagtaccgcagagtccttggggatagctgggttcacgtgcaggatggacggatcgtcgcgctcggagtgcacgccgagtcggtgcctccgccagcggatcgggtgatcgatgcacgcggcaaggtcgtgttacccggtttcatcaatgcccacacccatgtgaaccagatcctcctgcgcggagggccctcgcacgggcgtcaattctatgactggctgttcaacgttgtgtatccgggacaaaaggcgatgagaccggaggacgtagcggtggcggtgaggttgtattgtgcggaagctgtgcgcagcgggattacgacgatcaacgaaaacgccgattcggccatctacccaggcaacatcgaggccgcgatggcggtctatggtgaggtgggtgtgagggtcgtctacgcccgcatgttctttgatcggatggacgggcgcattcaagggtatgtggacgccttgaaggctcgctctccccaagtcgaactgtgctcgatcatggaggaaacggctgtggccaaagatcggatcacagccctgtcagatcagtatcatggcacggcaggaggtcgtatatcagtttggcccgctcctgccactaccacggcggtgacagttgaaggaatgcgatgggcacaagccttcgcccgtgatcgggcggtaatgtggacgcttcacatggcggagagcgatcatgatgagcggattcatgggatgagtcccgccgagtacatggagtgttacggactcttggatgagcgtctgcaggtcgcgcattgcgtgtactttgaccggaaggatgttcggctgctgcaccgccacaatgtgaaggtcgcatcgcaggttgtgagcaatgcctacctcggctcaggggtggcccccgtgccagagatggtggagcgcggcatggccgtgggcattggaacagatgacgggaattgtaatgactccgtaaacatgatcggagacatgaagtttatggcccatattcaccgcgcggtgcatcgggatgcggacgtgctgaccccagagaagattcttgaaatggcgacgatcgatggggcgcgttcgttgggaatggaccacgagattggttccatcgaaaccggcaagcgcgcggaccttatcctgcttgacctgcgtcaccctcagacgactcctcaccatcatttggcggccacgatcgtgtttcaggcttacggcaatgaggtggacactgtcctgattgacggaaatgttgtgatggagaaccgccgcttgagctttcttccccctgaacgtgagttggcgttccttgaggaagcgcggagccgcgccacagctattttgcagcgggcgaacatggtggctaacccagcttggcgcagcctctag

SEQ ID NO: 22 - DNA, 1425 bp, Artificial Sequence
  Description of Artificial Sequence: Synthetic oligonucleotide
atgcaaacgctcagcatccagcacggtaccctcgtcacgatggatcagtaccgcagagtccttggggatagctgggttcacgtgcaggatggacggatcgtcgcgctcggagtgcacgccgagtcggtgcctccgccagcggatcgggtgatcgatgcacgcggcaaggtcgtgttacccggtttcatcaatgcccacacccatgtgaaccagatcctcctgcgcggagggccctcgcacgggcgtcaactctatgactggctgttcaacgttttgtatccgggacaaaaggcgatgagaccggaggacgtagcggtggcggtgaggttgtattgtgcggaagctgtgcgcagcgggattacgacgatcaacgaaaacgccgattcggccatctacccaggcaacatcgaggccgcgatggcggtctatggtgaggtgggtgtgagggtcgtctacgcccgcatgttctttgatcggatggacgggcgcattcaagggtatgtggacgccttgaaggctcgctctccccaagtcgaactgtgctcgatcatggaggaaacggctgtggccaaagatcggatcacagccctgtcagatcagtatcatggcacggcaggaggtcgtatatcagtttggcccgctcctgccactaccacggcggtgacagttgaaggaatgcgatgggcacaagccttcgcccgtgatcgggcggtaatgtggacgcttcacatggcggagagcgatcatgatgagcggcttcatgggatgagtcccgccgagtacatggagtgttacggactcttggatgagcgtctgcaggtcgcgcattgcgtgtactttgaccggaaggatgttcggctgctgcaccgccacaatgtgaaggtcgcgtcgcaggttgtgagcaatgcctacctcggctcaggggtggcccccgtgccagagatggtggagcgcggcatggccgtgggcattggaacagatgacgggaattgtaatgactccgtaaacatgatcggagacatgaagtttatggcccatattcaccgcgcggtgcatcgggatgcggacgtgctgaccccagagaagattcttgaaatggcgacgatcgatggggcgcgttcgttgggaatggaccacgagattggttccatcgaaatcggcaagcgcgcggaccttatcctgcttgacctgcgtcaccctcagacgactcctcaccatcatttggcggccacgatcgtgtttcaggcttacggcaatgaggtggacactgtcctgattgacggaaacgttgtgatggagaaccgccgcttgagctttcttccccctgaacgtgagttggcgttccttgaggaagcgcagagccgcgccacagctattttgcagcgggcgaacatagtggctaacccagcttggcgcagcctctag

SEQ ID NO: 23 - DNA, 1425 bp, Artificial Sequence
  Description of Artificial Sequence: Synthetic oligonucleotide
atgcaaacgctcagcatccagcacggtaccctcgtcacgatggatcagtaccgcagagtccttggggatagctgggttcacgtgcaggatggacggatcgtcgcgctcggagtgcacgccgagtcggtgcctccgccagcggatcgggtgatcgatgcacgcggcaaggtcgtgttacccggtttcatcaatgcccacacccatgtgaaccagatcctcctgcgcggagggccctcgcacgggcgtcaactctatgactggctgttcaacgttgcgtatccgggacaaaaggcgatgagaccggaggacgtagcggtggcggtgaggttgtattgtgcggaagctgtgcgcagcgggattacgacgatcaacgaaaacgccgattcggccatctacccaggcaacatcgaggccgcgatggcggtctatggtgaggtgggtgtgagggtcgtctacgcccgcatgttctttgatcggatggacgggcgcattcaagggtatgtggacgccttgaaggctcgctctccccaagtcgaactgtgctcgatcatggaggaaacggctgtggccaaagatcggatcacagccctgtcagatcagtatcatggcacggcaggaggtcgtatatcagtttggcccgctcctgccactaccacggcggtgacagttgaaggaatgcgatgggcacaagccttcgcccgtgatcgggcggtaatgtggacgcttcacatggcggagagcgatcatgatgagcggcttcattggatgagtcccgccgagtacatggagtgttacggactcttggatgagcgtctgcaggtcgcgcattgcgtgtactttgaccggaaggatgttcggctgctgcaccgccacaatgtgaaggtcgcgtcgcaggttgtgagcaatgcctacctcggctcaggggtggcccccgtgccagagatggtggagcgcggcatggccgtgggcattggaacagatgacgggaattgtaatgactccgtaaacatgatcggagacatgaagtttatggcccatattcaccgcgcggtgcatcgggatgcggacgtgctgaccccagagaagattcttgaaatggcgacgatcgatggggcgcgttcgttgggaatggaccacgagattggttccatcgaaaccggcaagcgcgcggaccttatcctgcttgacctgcgtcaccctcagacgactcctcaccatcatttggcggccacgatcgtgtttcaggcttacggcaatgaggtggacactgtcctgattgacggaaacgttgtgatggagaaccgccgcttgagctttcttccccctgaacgtgagttggcgttccttgaggaagcgcagagccgcgccacagctattttgcagcgggcgaacatggtggctaacccagcttggcgcagcctctag

SEQ ID NO: 24 - DNA, 1425 bp, Artificial Sequence
  Description of Artificial Sequence: Synthetic oligonucleotide
atgcaaacgctcagcatccagcacggtaccctcgtcacgatggatcagtaccgcagagtccttggggatagctgggttcacgtgcaggatggacggatcgtcgcgctcggagtgcacgccgagtcggtgcctccgccagcggatcgggtgatcgatgcacgcggcaaggtcgtgttacccggtttcatcaatgcccacacccatgtgaaccagatcctcctgcgcggagggccctcgcacgggcgtcaattctatgactggctgttcaacgttgtgtatccgggacaaaaggcgatgagaccggaggacgtagcggtggcggtgaggttgtattgtgcggaagctgtgcgcagcgggattacgacgatcaacgacaacgccgattcggccatctacccaggcaacatcgaggccgcgatggcggtctatggtgaggtgggtgtgagggtcgtctacgcccgcatgttctttgatcggatggacgggcgcattcaagggtatgtggacgccttgaaggctcgctctccccaagtcgaactgtgctcgatcatggaggaaacggctgtggccaaagatcggatcacagccctgtcagatcagtatcatggcacggcaggaggtcgtatatcagtttggcccgctcctgccactaccacggcggtgacagttgaaggaatgcgatgggcacaagccttcgcccgtgatcgggcggtaatgtggacgcttcacatggcggagagcgatcatgatgagcggcttcattggatgagtcccgccgagtacatggagtgttacggactcttggatgagcgtctgcaggtcgcgcattgcgtgtactttgaccggaaggatgttcggctgctgcaccgccacaatgtgaaggtcgcgtcgcaggttgtgagcaatgcctacctcggctcaggggtggcccccgtgccagagatggtggagcgcggcatggccgtgggcattggaacagataacgggaatagtaatgactccgtaaacatgatcggagacatgaagtttatggcccatattcaccgcgcggtgcatcgggatgcggacgtgctgaccccagagaagattcttgaaatggcgacgatcgatggggcgcgttcgttgggaatggaccacgagattggttccatcgaaaccggcaagcgcgcggaccttatcctgcttgacctgcgtcaccctcagacgactcctcaccatcatttggcggccacgatcgtgtttcaggcttacggcaatgaggtggacactgtcctgattgacggaaacgttgtgatggagaaccgccgcttgagctttcttccccctgaacgtgagttggcgttccttgaggaagcgcagagccgcgccacagctattttgcagcgggcgaacatggtggctaacccagcttggcgcagcctctag

SEQ ID NO: 25 - DNA, 1425 bp, Artificial Sequence
  Description of Artificial Sequence: Synthetic oligonucleotide
atgcaaacgctcagcatccagcacggtaccctcgtcacgatggatcagtaccgcagagtccttggggatagctgggttcacgtgcaggatggacggatcgtcgcgctcggagtgcacgccgagtcggtgcctccgccagcggatcgggtgatcgatgcacgcggcaaggtcgtgttacccggtttcatcaatgcccacacccatgtgaaccagatcctcctgcgcggagggccctcgcacgggcgtcaactctatgactggctgttcaacgttttgtatccgggacaaaaggcgatgagaccggaggacgtagcggtggcggtgaggttgtattgtgcggaagctgtgcgcagcgggattacgacgatcaacgaaaacgccgattcggccatctacccaggcaacatcgaggccgcgatggcggtctatggtgaggtgggtgtgagggtcgtctacgcccgcatgttctttgatcggatggacgggcgcattcaagggtatgtggacgccttgaaggctcgctctccccaagtcgaactgtgctcgatcatggaggaaacggctgtggccaaagatcggatcacagccctgtcagatcagtatcatggcacggcaggaggtcgtatatcagtttggcccgctcctgccactaccacggcggtgacagttgaaggaatgcgatgggcacaagccttcgcccgtgatcgggcggtaatgtggacgcttcacatggcggagagcgatcatgatgagcggcttcattggatgagtcccgccgagtacatggagtgttacggactcttggatgagcgtctgcaggtcgcgcattgcgtgtactttgaccggaaggatgttcggctgctgcaccgccacaatgtgaaggtcgcgtcgcaggttgtgagcaatgcctacctcggctcaggggtggcccccgtgccagagatggtggagcgcggcatggccgtgggcattggaacagatgacgggaattgtaatgactccgtaaacatgatcggagacatgaagtttatggcccatattcaccgcgcggtgcatcgggatgcggacgtgctgaccccagagaagattcttgaaatggcgacgatcgatggggcgcgttcgttgggaatggaccacgagattggttccatcgaaaccggcaagcgcgcggaccttatcctgcttgacctgcgtcaccctcagacgactcctcaccatcatttggcggccacgatcgtgtttcaggcttacggcaatgaggtggacactgtcctgattgacggaaacgttgtgatggagaaccgccgcttgagctttcttccccctgaacgtgagttggcgttccttgaggaagcgcagagccgcgccacagctattttgcagcgggcgaacatggtggctaacccagcttggcgcagcctctag

SEQ ID NO: 26 - DNA, 1425 bp, Artificial Sequence
  Description of Artificial Sequence: Synthetic oligonucleotide
atgcaaacgctcagcatccagcacggtaccctcgtcacgatggatcagtaccgcagagtccttggggatagctgggttcacgtgcaggatggacggatcgtcgcgctcggagtgcacgccgagtcggtgcctccgccagcggatcgggtgatcgatgcacgcggcaaggtcgtgttacccggtttcatcaatgcccacacccatgtgaaccagatcctcctgcgcggagggccctcgcacgggcgccaactctatgactggctgttcaacgttttgtatccgggacaaaaggcgatgagaccggaggacgtagcggtggcggtgaggttgtattgtgcggaagctgtgcgcagcgggattacgacgatcaacgaaaacgccgattcggccatctacccaggcaacatcgaggccgcgatggcggtctatggtgaggtgggtgtgagggtcgtctacgcccgcatgttctttgatcggatggacgggcgcattcaagggtatgtggacgccttgaaggctcgctctccccaagtcgaactgtgctcgatcatggaggaaacggctgtggccaaagatcggatcacagccctgtcagatcagtatcatggcacggcaggaggtcgtatatcagtttggcccgctcctgccactaccacggcggtgacagttgaaggaatgcgatgggcacaagccttcgcccgtgatcgggcggtaatgtggacgcttcacatggcggagagcgatcatgatgagcggcttcattggatgagtcccgccgagtacatggagtgttacggactcttggatgagcgtctgcaggtcgcgcattgcgtgtactttgaccggaaggatgttcggctgctgcaccgccacaatgtgaaggtcgcgtcgcaggttgtgagcaatgcctacctcggctcaggggtggcccccgtgccagagatggtggagcgcggcatggccgtgggcattggaacagatgacgggaattgtaatgactccgtaaacatgatcggagacatgaagtttatggcccatattcaccgcgcggtgcatcgggatgcagacgtgctgaccccagagaagattcttgaaatggcgacgatcgatggggcgcgttcgttgggaatggaccacgagattggttccatcgaaaccggcaagcgcgcggaccttatcctgcttgacctgcgtcaccctcagacgactcctcaccatcatttggcggccacgatcgtgtttcaggcttacggcaatgaggtggacactgtcctgattgacggaaacgttgtgatggagaaccgccgcttgagctttcttccccctgaacgtgagttggcgttccttgaggaagcgcagagccgcgccacagctattttgcagcgggcgaacatggtggctaacccagcttggcgcagcctctag

SEQ ID NO: 27 - DNA, 1425 bp, Artificial Sequence; identical to SEQ ID NO: 18
  Description of Artificial Sequence: Synthetic oligonucleotide

SEQ ID NO: 28 - DNA, 1425 bp, Artificial Sequence
  Description of Artificial Sequence: Synthetic oligonucleotide
atgcaaacgctcagcatccagcacggtaccctcgtcacgatggatcagtaccgcagagtccttggggatagctgggttcacgtgcaggatggacggatcgtcgcgctcggagtgcacgccgagtcggtgcctccgccagcggatcgggtgatcgatgcacgcggcaaggtcgtgttacccggtttcatcaatgcccacacccatgtgaaccagatcctcctgcgcggagggccctcgcacgggcgtcaactctatgactggctgttcaacgttttgtatccgggacaaaaggcgatgagaccggaggacgtagcggtggcggtgaggttgtattgtgcggaagctgtgcgcagcgggattacgacgatcaacgaaaacgccgattcggccatctacccaggcaacatcgaggccgcgatggcggtctatggtgaggtgggtgtgagggtcgtctacgcccgcatgttctttgatcggatggacgggcgcattcaagggtatgtggacgccttgaaggctcgctctccccaagtcgaactgtgctcgatcatggaggaaacggctgtggccaaagatcggatcacagccctgtcagatcagtatcatggcacggcaggaggtcgtatatcagtttggcccgctcctgccactaccacggcggtgacagttgaaggaatgcgatgggcacaagccttcgcccgtgatcgggcggtaatgtggacgcttcacatggcggagagcgatcatgatgagcggattcatgggatgagtcccgccgagtacatggagtgttacggactcttggatgagcgtctgcaggtcgcgcattgcgtgtactttgaccggaaggatgttcggctgctgcaccgccacaatgtgaaggtcgcgtcgcaggttgtgagcaatgcctacctcggctcaggggtggcccccgtgccagagatggtggagcgcggcatggccgtgggcattggaacagatgacgggaattgtaatgactccgtaaacatgatcggagacatgaagtttatggcccatattcaccgcgcggtgcatcgggatgcggacgtgctgaccccagagaagattcttgaaatggcgacgatcgatggggcgcgttcgttgggaatggaccacgagattggttccatcgaaaccggcaagcgcgcggaccttatcctgcttgacctgcgtcaccctcagacgactcctcaccatcatttggcggccacgatcgtgtttcaggcttacggcaatgaggtggacactgtcctgattgacggaaacgttgtgatggagaaccgccgcttgagctttcttccccctgaacgtgagttggcgttccttgaggaagcgcagagccgcgccacagctattttgcagcgggcgaacatggtggctaacccagcttggcgcagcctctag

SEQ ID NO: 29 - DNA, 1425 bp, Artificial Sequence; identical to SEQ ID NO: 25
  Description of Artificial Sequence: Synthetic oligonucleotide

SEQ ID NO: 30 - DNA, 1425 bp, Artificial Sequence
  Description of Artificial Sequence: Synthetic oligonucleotide
atgcaaacgctcagcatccagcacggtaccctcgtcacgatggatcagtaccgcagagtccttggggatagctgggttcacgtgcaggatggacggatcgtcgcgctcggagtgcacgccgagtcggtgcctccgccagcggatcgggtgatcgatgcacgcggcaaggtcgtgttacccggtttcatcaatgcccacacccatgtgaaccagatcctcctgcgcggagggccctcgcacgggcgtcaactctatgactggctgttcaacgttgtgtatccgggacaaaaggcgatgagaccggaggacgtagcggtggcggtgaggttgtattgtgcggaagctgtgcgcagcgggattacgacgatcaacgaaaacgccgattcggccatctacccaggcaacatcgaggccgcgatggcggtctatggtgaggtgggtgtgagggtcgtctacgcccgcatgttctttgatcggatggacgggcgcattcaagggtatgtggacgccttgaaggctcgctctccccaagtcgaactgtgctcgatcatggaggaaacggctgtggccaaagatcggatcacagccctgtcagatcagtatcatggcacggcagggggtcgtatatcagtttggcccgctcctgccactaccacggcggtgacagttgaaggaatgcgatgggcacaagccttcgcccgtgatcgggcggtaatgtggacgcttcacatggcggagagcgatcatgatgagcggattcatgggatgagtcccgccgagtacatggagtgttacggactcttggatgagcgtctgcaggtcgcgcattgcgtgtactttgaccggaaggatgttcggctgctgcaccgccacaatgtgaaggtcgcgtcgcaggttgtgagcaatgcctacctcggctcaggggtggcccccgtgccagagatggtggagcgcggcatggccgtgggcattggaacagatgacgggaattgtaatgactccgtaaacatgatcggagacatgaagtttatggcccatattcaccgcgcggtgcatcgggatgcggacgtgctgaccccagagaagattcttgaaatggcgacgatcgatggggcgcgttcgttgggaatggaccacgagattggttccatcgaaaccggcaagcgcgcggaccttatcctgcttgacctgcgtcaccctcagacgactcctcaccatcatttggcggccacgatcgtgtttcaggcttacggcaatgaggtggacactgtcctgattgacggaaacgttgtgatggagaaccgccgcttgagctttcttccccctgaacgtgagttggcgttccttgaggaagcgcagagccgcgccacagctattttgcagcgggcgaacatggtggctaacccagcttggcgcagcctctag

SEQ ID NO: 31 - DNA, 1425 bp, Artificial Sequence
  Description of Artificial Sequence: Synthetic oligonucleotide
atgcaaacgctcagcatccagcacggtaccctcgtcacgatggatcagtaccgcagagtccttggggatagctgggttcacgtgcaggatggacggatcgtcgcgctcggagtgcacgccgagtcggtgcctccgccagcggatcgggtgatcgatgcacgcggcaaggtcgtgttacccggtttcatcaatgcccacacccatgtgaaccagatcctcctgcgcggagggccctcgcacgggcgtcaactctatgactggctgttcaacgttgtgtatccgggacaaaaggcgatgagaccggaggacgtagcggtggcggtgaggttgtattgtgcggaagctgtgcgcagcgggattacgacgatcaacgaaaacgccgattcggccatctacccaggcaacatcgaggccgcgatggcggtctatggtgaggtgggtgtgagggtcgtctacgcccgcatgttctttgatcggatggacgggcgcattcaagggtatgtggacgccttgaaggctcgctctccccaagtcgaactgtgctcgatcatggaggaaacggctgtggccaaagatcggatcacagccctgtcagatcagtatcatggcacggcaggaggtcgtatatcagtttggcccgctcctgccactaccacggcggtgacagttgaaggaatgcggtgggcacaagccttcgcccgtgatcgggcggtaatgtggacgcttcacatggcggagagcgatcatgatgagcggcttcattggatgagtcccgccgagtacatggagtgttacggactcttggatgagcgtctgcaggtcgcgcattgcgtgtactttgaccggaaggatgttcggctgctgcaccgccacaatgtgaaggtcgcgtcgcaggttgtgagcaatgcctacctcggctcaggggtggcccccgtgccagagatggtggagcgcggcatggccgtgggcattggaacagatgacgggaattgtaatgactccgtaaacatgatcggagacatgaagtttatggcccatattcaccgcgcggtgcatcgggatgcggacgtgctgaccccagagaagattcttgaaatggcgacgatcggtggggcgcgttcgttgggaatggaccacgagattggttccatcgaaaccggcaagcgcgcggaccttatcctgctagacctgcgtcaccctcagacgactcctcaccatcatttggcggccacgatcgtgtttcaggcttacggcaatgaggtggacactgtcctgattgacggaaacgttgtgatggagaaccgccgcttgagctttcttccccctgaacgtgagttggcgttccttgaggaagcgcagagccgcgccacagctattttgcagcgggcgaacatggtggctaacccagcttggcgcagcctctag

SEQ ID NO: 32 - DNA, 1425 bp, Artificial Sequence
  Description of Artificial Sequence: Synthetic oligonucleotide
atgcaaacgctcagcatccagcacggtaccctcgtcacgatggatcagtaccgcagagtccttggggatagctgggttcacgtgcaggatggacggatcgtcgcgctcggagtgcacgccgagtcggtgcctccgccagcggatcgggtgatcgatgcacgcggcaaggtcgtgttacccggtttcatcaatgcccacacccatgtgaaccagatcctcctgcgcggagggccctcgcacgggcgtcaactctatgactggctgttcaacgttgtgtatccgggacaaaaggcgatgagaccggaggacgtagcggtggcggtgaggttgtattgtgcggaagctgtgcgcagcgggattacgacgatcaacgaaaacgccgattcggccatctacccaggcaacatcgaggccgcgatggcggtctatggtgaggtgggtgtgagggtcgtctacgcccgcatgttctttgatcggatggacgggcgcattcaagggtatgtggacgccttgaaggctcgctctccccaagtcgaactgtgctcgatcatggaggaaacggctgtggccaaagatcggatcacagccctgtcagatcagtatcatggcacggcaggaggtcgtatatcagtttggcccgctcctgccactaccacggcggtgacagttgaaggaatgcgatgggcacaagccttcgcccgtgatcgggcggtaatgtggacgcttcacatggcggagagcgatcatgatgagcggattcatgggatgagtcccgccgagtacatggagtgttacggactcttggatgagcatctgcaggtcgcgcattgcgtgtactttgaccggaaggatgttcggctgctgcaccgccacaatgtgaaggtcgcgtcgcaggttgtgagcaatgcctacctcggctcaggggtggcccccgtgccagagatggtggagcgcggcatggccgtgggcattggaacagatgacgggaatagtaatgactccgtaaacatgatcggagacatgaagtttatggcccatattcaccgcgcggtgcatcgggatgcggacgtgctgaccccagagaagattcttgaaatggcgacgatcgatggggcgcgttcgttgggaatggaccacgagattggttccatcgaaaccggcaagcgcgcggaccttatcctgcttgacctgcgtcaccctcagacgactcctcaccatcatttggcggccacgatcgtgtttcaggcttacggcaatgaggtggacactgtcctgattgacggaaacgttgtgatggagaaccgccgcttgagctttcttccccctgaacgtgagttggcgttccttgaggaagcgcagagccgcgccacagctattttgcagcgggcgaacatggtggctaacccagcttggcgcagcctctag

SEQ ID NO: 33 - DNA, 1425 bp, Artificial Sequence
  Description of Artificial Sequence: Synthetic oligonucleotide
atgcaaacgctcagcatccagcacggtaccctcgtcacgatggatcagtaccgcagagtccttggggatagctgggttcacgtgcaggatggacggatcgtcgcgctcggagtgcacgccgagtcggtgcctccgccagcggatcgggtgatcgatgcacgcggcaaggtcgtgttacccggtttcatcaatgcccacacccatgtgaaccagatcctcctgcgcggagggccctcgcacgggcgtcaactctatgactggctgttcaacgttgtgtatccgggacaaaaggcgatgagaccggaggacgtagcggtggcggtgaggttgtattgtgcggaagctgtgcgcagcgggattacgacgatcaacgaaaacgccgattcggccatctacccaggcaacatcgaggccgcgatggcggtctatggtgaggtgggtgtgagggtcgtctacgcccgcatgttctttgatcggatggacgggcgcattcaagggtatgtggacgccttgaaggctcgctctccccaagtcgaactgtgctcgatcatggaggaaacggctgtggccaaagatcggatcacagccctgtcagatcagtatcatggcacggcaggaggtcgtatatcagtttggcccgctcctgccactaccacggcggtgacagttgaaggaatgcgatgggcacaagccttcgcccgtgatcgggcggtaatgtggacgcttcacatggcggagagcgatcatgatgagcggattcatgggatgagtcccgccgagtacatggagtgttacggactcttggatgagcgtctgcaggtcgcgcattgcgtgtactttgaccggaaggatgttcggctgctgcaccgccacaatgtgaaggtcgcgtcgcaggttgtgagcaatgcctacctcggctcaggggtggcccccgtgccagagatggtggagcgcggcatggccgtgggcattggaacagatgacgggaatagtaatgactccgtaaacatgatcggagacatgaagtttatggcccatattcaccgcgcggtgcatcgggatgcggacgtgctgaccccagagaagattcttgaaatggcgacgatcgatggggcgcgttcgttgggaatggaccacgagattggttccatcgaaaccggcaagcgcgcggaccttatcctgcttgacctgcgtcaccctcagacgactcctcaccatcatttggcggccacgatcgtgtttcaggcttacggcaatgaggtggacactgtcctgattgacggaaacgttgtgatggagaaccgccgcttgagctttcttccccctgaacgtgagttggcgttccttgaggaagcgcagagccgcgccacagctattttgcagcgggcgaacatggtggctaacccagcttggcgcagcctctag

SEQ ID NO: 34 - DNA, 1425 bp, Artificial Sequence
  Description of Artificial Sequence: Synthetic oligonucleotide
atgcaaacgctcagcatccagcacggtaccctcgtcacgatggatcagtaccgcagagtccttggggatagctgggttcacgtgcaggatggacggatcgtcgcgctcggagtgcacgccgagtcggtgcctccgccagcggatcgggtgatcgatgcacgcggcaaggtcgtgttacccggtttcatcaatgcccacacccatgtgaaccagatcctcctgcgcggagggccctcgcacgggcgtcaattctatgactggctgttcaacgttgtgtatccgggacaaaaggcgatgagaccggaggacgtagcggtggcggtgaggttgtattgtgcggaagctgtgcgcagcgggattacgacgatcaacgaaaacgccgattcggccatctacccaggcaacatcgaggccgcgatggcggtctatggtgaggtgggtgtgagggtcgtctacgcccgcatgttctttgatcggatggacgggcgcattcaagggtatgtggacgccttgaaggctcgctctccccaagtcgaactgtgctcgatcatggaggaaacggctgtggccaaagatcggatcacagccctgtcagatcagtatcatggcacggcaggaggtcgtatatcagtttggcccgctcctgccactaccacggcggtgacagttgaaggaatgcgatgggcacaagccttcgcccgtgatcgggcggtaatgtggacgcttcacatggcggagagcgatcatgatgagcggattcatgggatgagtcccgccgagtacatggagtgttacggactcttggatgagcgtctgcaggtcgcgcattgcgtgtactttgaccggaaggatgttcggctgctgcaccgccacaatgtgaaggtcgcgtcgcaggttgtgagcaatgcctacctcggctcaggggtggcccccgtgccagagatggtggagcgcggcatggccgtgggcattggaacagatgacgggaattgtaatgactccgtaaacatgatcggagacatgaagtttatggcccatattcaccgcgcggtgcatcgggatgcggacgtgctgaccccagagaagattcttgaaatggcgacgatcgatggggcgcgttcgttgggaatggaccacgagattggttccatcgaaaccggcaagcgcgcggaccttatcctgcttgacctgcgtcaccctcagacgactcctcaccatcatttggcggccacgatcgtgtttcaggcctacggcaatgaggtggacactgtcctgattgacggaaacgttgtgatggagaaccgccgcttgagctttcttccccctgaacgtgagttggcgttccttgaggaagcgcagagccgcgccacagctattttgcagcgggcgaacatggtggctaacccagcttggcgcagcctctag

SEQ ID NO: 35 - DNA, 1425 bp, Artificial Sequence; identical to SEQ ID NO: 28
  Description of Artificial Sequence: Synthetic oligonucleotide

SEQ ID NO: 36 - DNA, 1425 bp, Artificial Sequence
  Description of Artificial Sequence: Synthetic oligonucleotide
atgcaaacgctcagcatccagcacggtaccctcgtcacgatggatcagtaccgcagagtccttggggatagctgggttcacgtgcagggtggacggatcgtcgcgctcggagtgcacgccgagtcggtgcctccgccagcggatcgggtgatcgatgcacgcggcaaggtcgtgttacccggtttcatcaatgcccacacccatgtgaaccagatcctcctgcgcggagggccctcgcacgggcgtcaactctatgactggctgttcaacgttgtgtatccgggacaaaaggcgatgagaccggaggacgtagcggtggcggtgaggttgtattgtgcggaagctgtgcgcagcgggattacgacgatcaacgaaaacgccgattcggccatctacccaggcaacatcgaggccgcgatggcggtctatggtgaggtgggtgtgagggtcgtctacgcccgcatgttctttgatcgggtggacgggcgcattcaagggtatgtggacgccttgaaggctcgctctccccaagtcgaactgtgctcgatcatggaggaaacggctgtggccaaagatcggatcacagccctgtcagatcagtatcatggcacggcaggaggtcgtatatcagtttggcccgctcctgccactaccacggcggtgacagttgaaggaatgcgatgggcacaagccttcgcccgtgatcgggcggtaatgtggacgcttcacatggcggagagcgatcatgatgagcggattcatgggatgagtcccgccgagtacatggagtgttacggactcttggatgagcgtctgcaggtcgcgcattgcgtgtactttgaccggaaggatgttcggctgctgcaccgccacaatgtgaaggtcgcgtcgcaggttgtgagcaatgcctacctcggctcaggggtggcccccgtgccagagatggtggagcgcggcatggccgtgggcattggaacagatgacgggaattgtaatgactccgtaaacatgatcggagacatgaagtttatggcccatattcaccgcgcggtgcatcgggatgcggacgtgctgaccccagagaagattcttgaaatggcgacgatcgatggggcgcgttcgttgggaatggaccacgagattggttccatcgaaaccggcaagcgcgcggaccttatcctgcttgacctgcgtcaccctcagacgactcctcaccatcatttggcggccacgatcgtgtttcaggcttacggcaatgaggtggacactgtcctgattgacggaaacgttgtgatggagaaccgccgcttgagctttcttccccctgaacgtgagttggcgttccttgaggaagcgcagagccgcgccacagctattttgcagcgggcgaacatggtggctaacccagcttggcgcagcctctag

SEQ ID NO: 37 - DNA, 1425 bp, Artificial Sequence
  Description of Artificial Sequence: Synthetic oligonucleotide
atgcaaacgctcagcatccagcacggtaccctcgtcacgatggatcagtaccgcagagtccttggggatagctgggttcacgtgcaggatggacggatcgtcgcgctcggagtgcacgccgagtcggtgcctccgccagcggatcgggtgatcgatgcacgcggcaaggtcgtgttacccggtttcatcaatgcccacacccatgtgaaccagatcctcctgcgcggagggccctcgcacgggcgtcaactctatgactggctgttcaacgttttgtatccgggacaaaaggcgatgagaccggaggacgtagcggtggcggtgaggttgtattgtgcggaagctgtgcgcagcgggattacgacgatcaacgacaacgccgattcggccatctacccaggcaacatcgaggccgcgatggcggtctatggtgaggtgggtgtgagggtcgtctacgcccgcatgttctttgatcggatggacgggcgcattcaagggtatgtggacgccttgaaggctcgctctccccaagtcgaactgtgctcgatcatggaggaaacggctgtggccaaagatcggatcacagccctgtcagatcagtatcatggcacggcaggaggtcgtatatcagtttggcccgctcctgccactaccacggcggtgacagttgaaggaatgcgatgggcacaagccttcgcccgtgatcgggcggtaatgtggacgcttcacatggcggagagcgatcatgatgagcggcttcattggatgagtcccgccgagtacatggagtgttacggactcttggatgagcgtctgcaggtcgcgcattgcgtgtactttgaccggaaggatgttcggctgctgcaccgccacaatgtgaaggtcgcgtcgcaggttgtgagcaatgcctacctcggctcaggggtggcccccgtgccagagatggtggagcgcggcatggccgtgggtattggaacagatgacgggaatagtaatgactccgtaaacatgatcggagacatgaagtttatggcccatattcaccgcgcggtgcatcgggatgcggacgtgctgaccccagagaagattcttgaaatggcgacgatcgatggggcgcgttcgttgggaatggaccacgagattggttccatcgaaaccggcaagcgcgcggaccttatcctgcttgacctgcgtcaccctcagacgactcctcaccatcatttggcggccacgatcgtgtttcaggcttacggcaatgaggtggacactgtcctgattgacggaaacgttgtgatggagaaccgccgcttgagctttcttccccctgaacgtgagttggcgttccttgaggaagcgcagagccgcgccacagctattttgcagcgggcgaacatggtggctaacccagcttggcgcagcctctag

SEQ ID NO: 38 - DNA, 1425 bp, Artificial Sequence; identical to SEQ ID NO: 18
  Description of Artificial Sequence: Synthetic oligonucleotide

SEQ ID NO: 39 - DNA, 1425 bp, Artificial Sequence; identical to SEQ ID NO: 28
  Description of Artificial Sequence: Synthetic oligonucleotide

SEQ ID NO: 40 - DNA, 1425 bp, Artificial Sequence
  Description of Artificial Sequence: Synthetic oligonucleotide
atgcaaacgctcagcatccagcacggtaccctcgtcacgatggatcagtaccgcagagtccttggggatagctgggttcacgtgcaggatggacggatcgtcgcgctcggagtgcacgccgagtcggtgcctccgccagcggatcgggtgatcgatgcacgcggcaaggtcgtgttacccggtttcatcaatgcccacacccatgtgaaccagatcctcctgcgcggagggccctcgcacgggcgtcaattctatgactggctgttcaacgttgtgtatccgggacaaaaggcgatgagaccggaggacgtagcggtggcggtgaggttgtattgtgcggaagctgtgcgcagcgggattacgacgatcaacgaaaacgccgattcggccatctacccaggcaacatcgaggccgcgatggcggtctatggtgaggtgggtgtgagggtcgtctacgcccgcatgttctttgatcggatggacgggcgcattcaagggtatgtggacgccttgaaggctcgctctccccaagtcgaactgtgctcgatcatggaggaaacggctgtggccaaagatcggatcacagccctgtcagatcagtatcatggcacggcaggaggtcgtatatcagtttggcccgctcctgccactaccacggcggtgacagttgaaggaatgcgatgggcacaagccttcgcccgtgatcgggcggtaatgtggacgcttcacatggcggagagcgatcatgatgagcggattcatgggatgagtcccgccgagtacatggagtgttacggactcttggatgagcgtctgcaggtcgcgcattgcgtgtactttgaccggaaggatgttcggctgctgcaccgccacaatgtgaaggtcgcgtcgcaggttgtgagcaatgcctacctcggctcaggggtggcccccgtgccagagatggtggagcgcggcatggccgtgggcattggaacagataacgggaatagtaatgactccgtaaacatgatcggagacatgaagtttatggcccatattcaccgcgcggtgcatcgggatgcggacgtgctgaccccagagaagattcttgaaatggcgacgatcgatggggcgcgttcgttgggaatggaccacgagattggttccatcgaaaccggcaagcgcgcggaccttatcctgcttgacctgcgtcaccctcagacgactcctcaccatcatttggcggccacgatcgtgtttcaggcttacggcaatgaggtggacactgtcctgattgacggaaacgttgtgatggagaaccgccgcttgagctttcttccccctgaacgtgagttggcgttccttgaggaagcgcagagccgcgccacagctattttgcagcgggcgaacatggtggctaacccagcttggcgcagcctctag

SEQ ID NO: 41 - DNA, 1425 bp, Artificial Sequence
  Description of Artificial Sequence: Synthetic oligonucleotide
atgcaaacgctcagcatccagcacggtaccctcgtcacgatggatcagtaccgcagagtccttggggatagctgggttcacgtgcaggatggacggatcgtcgcgctcggagtgcacgccgagtcggtgcctccgccagcggatcgggtgatcgatgcacgcggcaaggtcgtgttacccggtttcatcaatgcccacacccatgtgaaccagatcctcctgcgcggagggccctcgcacgggcgtcaattctatgactggctgttcaacgttgtgtatccgggacaaaaggcgatgagaccggaggacgtagcggtggcggtgaggttgtattgtgcggaagctgtgcgcagcgggattacgacgatcaacgacaacgccgattcggccatctacccaggcaacatcgaggccgcgatggcggtctatggtgaggtgggtgtgagggtcgtctacgcccgcatgttctttgatcggatggacgggcgcattcaagggtatgtggacgccttgaaggctcgctctccccaagtcgaactgtgctcgatcatggaggaaacggctgtggccaaagatcggatcacagccctgtcagatcagtatcatggcacggcaggaggtcgtatatcagtttggcccgctcctgccattaccccggcggtgacagttgaaggaatgcgatgggcacaagccttcgcccgtgatcgggcggtaatgtggacgcttcacatggcggagagcgatcatgatgagcggcttcattggatgagtcccgccgagtacatggagtgttacggactcttggatgagcgtctgcaggtcgcgcattgcgtgtactttgaccggaaggatgttcggctgctgcaccgccacaatgtgaaggtcgcgtcgcaggttgtgagcaatgcctacctcggctcaggggtggcccccgtgccagagatggtggagcgcggcatggccgtgggcattggaacagatgacgggaattgtaatgactccgtaaacatgatcggagacatgaagtttatggcccatattcaccgcgcggtgcatcgggatgcggacgtgctgaccccagagaagattcttgaaatggcgacgatcgatggggcgcgttcgttgggaatggaccacgagattggttccatcgaaaccggcaagcgcgcggaccttatcctgcttgacctgcgtcaccctcagacgactcctcaccatcatttggcggccacgatcgtgtttcaggcttacggcaatgaggtggacactgtcctgattgacggaaacgttgtgatggagaaccgccgcttgagctttcttccccctgaacgtgagttggcgttccttgaggaagcgcagagccgcgccacagctattttgcagcgggcgaacatggtggctaacccagcttggcgcagcctctag

SEQ ID NO: 42 - DNA, 1425 bp, Artificial Sequence; identical to SEQ ID NO: 18
  Description of Artificial Sequence: Synthetic oligonucleotide

SEQ ID NO: 43 - DNA, 1425 bp, Artificial Sequence
  Description of Artificial Sequence: Synthetic oligonucleotide
atgcaaacgctcagcatccagcacggtaccctcgtcacgatggatcagtaccgcagagtccttggggatagctgggttcacgtgcaggatggacggatcgtcgcgctcggagtgcacgccgagtcggtgcctccgccagcggatcgggtgatcgatgcacgcggcaaggtcgtgttacccggtttcatcaatgcccacacccatgtgaaccagatcctcctgcgcggagggccctcgcacgggcgtcaactctatgactggctgttcaacgttgtgtatccgggacaaaaggcgatgagaccggaggacgtagcggtggcggtgaggttgtattgtgcggaagctgtgcgcagcgggattacgacgatcaacgacaacgccgattcggccatctacccaggcaacatcgaggccgcgatggcggtctatggtgaggtgggtgtgagggtcgtctacgcccgcatgttctttgatcggatggacgggcgcattcaagggtatgtggacgccttgaaggctcgctctccccaagtcgaactgtgctcgatcatggaggaaacggctgtggccaaagatcggatcacagccctgtcagatcagtatcatggcacggcaggaggtcgtatatcagtttggcccgctcctgccattaccacggcggtgacagttgaaggaatgcgatgggcacaagccttcgcccgtgatcgggcggtaatgtggacgcttcacatggcggagagcgatcatgatgagcggcttcattggatgagtcccgccgagtacatggagtgttacggactcttggatgagcgtctgcaggtcgcgcattgcgtgtactttgaccggaaggatgttcggctgctgcaccgccacaatgtgaaggtcgcgtcgcaggttgtgagcaatgcctacctcggctcaggggtggcccccgtgccagagatggtggagcgcggcatggccgtgggcattggaacagatgacgggaatagtaatgactccgtaaacatgatcggagacatgaagtttatggcccatattcaccgcgcggtgcatcgggatgcggacgtgctgaccccagagaagattcttgaaatggcgacgatcgatggggcgcgttcgttgggaatggaccacgagattggttccatcgaaaccggcaagcgcgcggaccttatcctgcttgacctgcgtcaccctcagacgactcctcaccatcatttggcggccacgatcgtgtttcaggcttacggcaatgaggtggacactgtcctgattgacggaaacgttgtgatggagaaccgccgcttgagctttcttccccctgaacgtgagttggcgttccttgaggaagcgcagagccgcgccacagctattttgcagcgggcgaacatggtggctaacccagcttggcgcagcctctag

SEQ ID NO: 44 - DNA, 1425 bp, Artificial Sequence
  Description of Artificial Sequence: Synthetic oligonucleotide
atgcaaacgctcagcatccagcacggtaccctcgtcacgatggatcagtaccgcagagtccttggggatagctgggttcacgtgcaggatggacggatcgtcgcgctcggagtgcacgccgagtcggtgcctccgccagcggatcgggtgatcgatgcacgcggcaaggtcgtgttacccggtttcatcaatgcccacacccatgtgaaccagatcctcctgcgcggagggccctcgcacgggcgtcaactctatgactggctgttcaacgttggttatccgggacaaaaggcgatgagaccggaggacgtagcggtggcggtgaggttgtattgtgcggaagctgtgcgcagcgggattacgacgatcaacgaaaacgccgattcggccatctacccaggcaacatcgaggccgcgatggcggtctatggtgaggtgggtgtgagggtcgtctacgcccgcatgttctttgatcggatggacgggcgcattcaagggtatgtggacgccttgaaggctcgctctccccaagtcgaactgtgctcgatcatggaggaaacggctgtggccaaagatcggatcacagccctgtcagatcagtatcatggcacggcaggaggtcgtatatcagtttggcccgctcctgccactaccacggcggtgacagttgaaggaatgcgatgggcacaagccttcgcccgtgatcgggcggtaatgtggacgcttcacatggcggagagcgatcatgatgagcggcttcattggatgagtcccgccgagtacatggagtgttacggactcttggatgagcgtctgcaggtcgcgcattgcgtgtactttgaccggaaggatgttcggctgctgcaccgccacaatgtgaaggtcgcgtcgcaggttgtgagcaatgcctacctcggctcaggggtggcccccgtgccagagatggtggagcgcggcatggccgtgggcattggaacagatgacgggaattgtaatgactccgtaaacatgatcggagacatgaagtttatggcccatattcaccgcgcggtgcatcgggatgcggacgtgctgaccccagagaagattcttgaaatggcgacgatcgatggggcgcgttcgttgggaatggaccacgagattggttccatcgaaaccggcaagcgcgcggaccttatcctgcttgacctgcgtcaccctcagacgactcctcaccatcatttggcggccacgatcgtgtttcaggcttacggcaatgaggtggacactgtcctgattgacggaaacgttgtgatggagaaccgccgcttgagctttcttccccctgaacgtgagttggcgttccttgaggaagcgcagagccgcgccacagctattttgcagcgggcgaacatggtggctaacccagcttggcgcagcctctag

SEQ ID NO: 45 - DNA, 1425 bp, Artificial Sequence
  Description of Artificial Sequence: Synthetic oligonucleotide
atgcaaacgctcagcatccagcacggtaccctcgtcacgatggatcagtaccgcagagtccttggggatagctgggttcacgtgcaggatggacggatcgtcgcgctcggagtgcacgccgagtcggtgcctccgccagcggatcgggtgatcgatgcacgcggcaaggtcgtgttacccggtttcatcaatgcccacacccatgtgaaccagatcctcctgcgcggagggccctcgcacgggcgtcaactctatgactggctgttcaacgttgcgtatccgggacaaaaggcgatgagaccggaggacgtagcggtggcggtgaggttgtattgtgcggaagctgtgcgcagcgggattacgacgatcaacgaaaacgccgattcggccatctacccaggcaacatcgaggccgcgatggcggtctatggtgaggtgggtgtgagggtcgtctacgcccgcatgttctttgatcggatggacgggcgcattcaagggtatgtggacgccttgaaggctcgctctccccaagtcgaactgtgctcgatcatggaggaaacggctgtggccaaagatcggatcacagccctgtcagatcagtatcatggcacggcaggaggtcgtatatcagtttggcccgctcctgccactaccacggcggtgacagttgaaggaatgcgatgggcacaagccttcgcccgtgatcgggcggtaatgtggacgcttcacatggcggagagcgatcatgatgagcggcttcattggatgagtcccgccgagtacatggagtgttacggactcttggatgagcgtctgcaggtcgcgcattgcgtgtactttgaccggaaggatgttcggctgctgcaccgccacaatgtgaaggtcgcgtcgcaggttgtgagcaatgcctacctcggctcaggggtggcccccgtgccagagatggtggagcgcggcatggccgtgggcattggaacagataacgggaattgtaatgactccgtaaacatgatcggagacatgaagtttatggcccatattcaccgcgcggtgcatcgggatgcggacgtgctgaccccagagaagattcttgaaatggcgacgatcgatggggcgcgttcgttgggaatggaccacgagattggttccatcgaaaccggcaagcgcgcggaccttatcctgcttgacctgcgtcaccctcagacgactcctcaccatcatttggcggccacgatcgtgtttcaggcttacggcaatgaggtggacactgtcctgattgacggaaacgttgtgatggagaaccgccgcttgagctttcttccccctgaacgtgagttggcgttccttgaggaagcgcagagccgcgccacagctattttgcagcgggcgaacatggtggctaacccagcttggcgcagcctctag

SEQ ID NO: 46 - DNA, 1425 bp, Artificial Sequence; identical to SEQ ID NO: 45
  Description of Artificial Sequence: Synthetic oligonucleotide

SEQ ID NO: 47 - DNA, 1425 bp, Artificial Sequence; identical to SEQ ID NO: 45
  Description of Artificial Sequence: Synthetic oligonucleotide

SEQ ID NO: 48 - DNA, 1425 bp, Artificial Sequence
  Description of Artificial Sequence: Synthetic oligonucleotide
atgcaaacgctcagcatccagcacggtaccctcgtcacgatggatcagtaccgcagagtccttggggatagctgggttcacgtgcaggatggacggatcgtcgcgctcggagtgcacgccgagtcggtgcctccgccagcggatcgggtgatcgatgcacgcggcaaggtcgtgttacccggtttcatcaatgcccacacccatgtgaaccagatcctcctgcgcggagggccctcgcacgggcgtcaactctatgactggctgttcaacgttggttatccgggacaaaaggcgatgagaccggaggacgtagcggtggcggtgaggttgtattgtgcggaagctgtgcgcagcgggattacgacgatcaacgaaaacgccgattcggccatctacccaggcaacatcgaggccgcgatggcggtctatggtgaggtgggtgtgagggtcgtctacgcccgcatgttctttgatcggatggacgggcgcattcaagggtatgtggacgccttgaaggctcgctctccccaagtcgaactgtgctcgatcatggaggaaacggctgtggccaaagatcggatcacagccctgtcagatcagtatcatggcacggcaggaggtcgtatatcagtttggcccgctcctgccactaccacggcggtgacagttgaaggaatgcgatgggcacaagccttcgcccgtgatcgggcggtaatgtggacgcttcacatggcggagagcgatcatgatgagcggcttcattggatgagtcccgccgagtacatggagtgttacggactcttggatgagcgtctgcaggtcgcgcattgcgtgtactttgaccggaaggatgttcggctgctgcaccgccacaatgtgaaggtcgcgtcgcaggttgtgagcaatgcctacctcggctcaggggtggcccccgtgccagagatggtggagcgcggcatggccgtgggcattggaacagataacgggaattgtaatgactccgtaaacatgatcggagacatgaagtttatggcccatattcaccgcgcggtgcatcgggatgcggacgtgctgaccccagagaagattcttgaaatggcgacgatcgatggggcgcgttcgttgggaatggaccacgagattggttccatcgaaaccggcaagcgcgcggaccttatcctgcttgacctgcgtcaccctcagacgactcctcaccatcatttggcggccacgatcgtgtttcaggcttacggcaatgaggtggacactgtcctgattgacggaaacgttgtgatggagaaccgccgcttgagctttcttccccctgaacgtgagttggcgttccttgaggaagcgcagagccgcgccacagctattttgcagcgggcgaacatggtggctaacccagcttggcgcagcctctag

SEQ ID NO: 49 - protein, 474 aa, Artificial Sequence
  Description of Artificial Sequence: Synthetic peptide
MQTLSIQHGTLVTMDQYRRVLGDSWVHVQDGRIVALGVHAESVPPPADRVIDARGKVVLPGFINAHTHVNQILLRGGPSHGRQLYDWLFNVVYPGQRAMRPEDVAVAVRLYCAEAVRSGITTINENADSAIYPGNIEAAMAVYGEVGVRVVYARMFFDRMDGRIQGYVDALKARSPQVELCSIMEETAVAKDRITALSDQYHGTAGGRISVWPAPATTTAVTVEGMRWAQAFARDRAVMWTLHMAESDHDERLHWMSPAEYMECYGLLDERLQVAHCVYFDRKDVRLLHRHNVKVASQVVSNAYLGSGVAPVPEMVERGMAVGIGTDNGNSNDSVNMIGDMKFMAHIHRAVHRDADVLTPEKILEMATIDGARSLGMDHEIGSIETGKRADLILLDLRHPQTTPHHHLAATIVFQAYGNEVDTVLIDGNVVMENRRLSFLPPERELAFLEEAQSRATAILQRANMVANPAWRSL

SEQ ID NO: 50 - protein, 474 aa, Artificial Sequence
  Description of Artificial Sequence: Synthetic peptide
MQTLSIQHGTLVTMDQYRRVLGDSWVHVQDGRIVALGVHAESVPPPADRVIDARGKVVLPGFINAHTHVNQILLRGGPSHGRQFYDWLFNVVYPGQKAMRPEDVAVAVRLYCAEAVRSGITTINENADSAIYPGNIEAAMAVYGEVGVRVVYARMFFDRMDGRIQGYVDALKARSPQVELCSIMEETAVAKDRITALSDQYHGTAGGRISVWPAPATTTAVTVEGMRWAQAFARDRAVMWTLHMAESDHDERLHWMSPAEYMECYGLLDERLQVAHCVYFDRKDVRLLHRHNVKVASQVVSNAYLGSGVAPVPEMVERGMAVGIGTDNGNSNDSVNMIGDMKFMAHIHRAVHRDADVLTPEKILEMATIDGARSLGMDHEIGSIETGKRADLILLDLRHPQTTPHHHLAATIVFQAYGNEVDTVLIDGNVVMENRRLSFLPPERELAFLEEAQSRATAILQRANMVANPAWRSL

SEQ ID NO: 51 - protein, 474 aa, Artificial Sequence
  Description of Artificial Sequence: Synthetic peptide
MQTLSIQHGTLVTMDQYRRVLGDSWVHVQDGRIVALGVHAESVPPPADRVIDARGKVVLPGFINAHTHVNQILLRGGPSHGRQLYDWLFNVLYPGQKAMRPEDVAVAVRLYCAEAVRSGITTINENADSAIYPGNIEAAMAVYGEVGVRVVYARMFFDRMDGRIQGYVDALKARSPQVELCSIMEETAVAKDRITALSDQYHGTAGGRISVWPAPATTTAVTVEGMRWAQAFARDRAVMWTLHMAESDHDERLHWMSPAEYMECYGLLDERLQVAHCVYFDRKDVRLLHRHNVKVASQVVSNAYLGSGVAPVPEMVERGMAVGIGTDDGNSNDSVNMIGDMKFMAHIHRAVHRDADVLTPEKILEMATIDGARSLGMDHEIGSIETGKRADLILLDLRHPQTTPHHHLAATIVFQAYGNEVDTVLIDGNVVMENRRLSFLPPERELAFLEEAQSRATAILQRANMVANPAWRSL

SEQ ID NO: 52 - protein, 474 aa, Artificial Sequence; identical to SEQ ID NO: 50
  Description of Artificial Sequence: Synthetic peptide

SEQ ID NO: 53 - protein, 474 aa, Artificial Sequence
  Description of Artificial Sequence: Synthetic peptide
MQTLSIQHGTLVTMDQYRRVLGDSWVHVQDGRIVALGVHAESVPPPADRVIDARGKVVLPGFINAHTHVNQILLRGGPSHGRQLYDWLFNVVYPGQKAMRPEDVAVAVRLYCAEAVRSGITTINENADSAIYPGNIEAAMAVYGEVGVRVVYARMFFDRMDGRIQGYVDALKARSPQVELCSIMEETAVAKDRITALSDQYHGTAGGRISVWPAPATTTAVTVEGMRWAQAFARDRAVMWTLHMAESDHDERLHWMSPAEYMECYGLLDERLQVAHCVYFDRKDVRLLHRHNVKVASQVVSNAYLGSGVAPVPEMVERGMAVGIGTDNGNSNDSVNMIGDMKFMAHIHRAVHRDADVLTPEKILEMATIDGARSLGMDHEIGSIETGKRADLILLDLRHPQTTPHHHLAATIVFQAYGNEVDTVLIDGNVVMENRRLSFLPPERELAFLEEAQSRATAILQRANMVANPAWRSL

SEQ ID NO: 54 - protein, 474 aa, Artificial Sequence
  Description of Artificial Sequence: Synthetic peptide
MQTLSIQHGTLVTMDQYRRVLGDSWVHVQDGRIVALGVHAESVPPPADRVIDARGKVVLPGFINAHTHVNQILLRGGPSHGRQLYDWLFNVVYPGQKAMRPEDVAVAVRLYCAEAVRSGITTINENADSAIYPGNIEAAMAVYGEVGVRVVYARMFFDRMDGRIQGYVDALKARSPQVELCPIMEETAVAKDRITALSDQYHGTAGGRISVWPAPATTTAVTVEGMRWAQAFARDRAVMWTLHMAESDHDERLHWMSPAEYMECYGLLDERLQVAHCVYFDRKDVRLLHRHNVKVASQVVSNAYLGSGVAPVPEMVERGMAVGIGTDNGNSNDSVNMIGDMKFMAHIHRAVHRDADVLTPEKILEMATIDGARSLGMDHEIGSIETGKRADLILLDLRHPQTTPHHHLAATIVFQAYGNEVDTVLIDGNVVMENRRLSFLPPERELAFLEEAQSRATAILQRANMVANPAWRSL

SEQ ID NO: 55 - protein, 474 aa, Artificial Sequence
  Description of Artificial Sequence: Synthetic peptide
MQTLSIQHGTLVTMDQYRRVLGDSWVHVQDGRIVALGVHAESVPPPADRVIDARGKVVLPGFINAHTHVNQILLRGGPSHGRQLYDWLFNVVYPGQKAMRPEDVAVAVRLYCAEAVRSGITTINENADSAIYPGNIEAAMAVYGEVGVRVVYARMFFDRMDGRIQGYVDALKARSPQVELCSIMEETAAAKDRITALSDQYHGTAGGRISVWPAPATTTAVTVEGMRWAQAFARDRAVMWTLHMAESDHDERIHGMSPAEYMECYGLLDERLQVAHCVYFDRKDVRLLHRHNVKVASQVVSNAYLGSGVAPVPEMVERGMAVGIGTDNGNSNDSVNMIGDMKFMAHIHRAVHRDADVLTPEKILEMATIDGARSLGMDHEIGSIETGKRADLILLDLRHPQTTPHHHLAATIVFQAYGNEVDTVLIDGNVVMENRRLSFLPPERELAFLEEAQSRATAILQRANMVANPAWRSL

SEQ ID NO: 56 - protein, 474 aa, Artificial Sequence
  Description of Artificial Sequence: Synthetic peptide
MQTLSIQHGTLVTMDQYRRVLGDSWVHVQDGRIVALGVHAESVPPPADRVIDARGKVVLPGFINAHTHVNQILLRGGPSHGRQFYDWLFNVVYPGQKAMRPEDVAVAVRLYCAEAVRSGITTINDNADSAIYPGNIEAAMAVYGEVGVRVVYARMFFDRMDGRIQGYVDALKARSPQVELCSIMEETAVAKDRITALSDQYHGTAGGRISVWPAPATTTAVTVEGMRWAQAFARDRAVMWTLHMAESDHDERIHGMSPAEYMECYGLLDERLQVAHCVYFDRKDVRLLHRHNVKVASQVVSNAYLGSGVAPVPEMVERGMAVGIGTDNGNSNDSVNMIGDMKFMAHIHRAVHRDADVLTPEKILEMATIDGARSLGMDHEIGSIETGKRADLILLDLRHPQTTPHHHLAATIVFQAYGNEVDTVLIDGNVVMENRRLSFLPPERELAFLEEAQSRATAILQRANMVANPAWRSL

SEQ ID NO: 57 - protein, 474 aa, Artificial Sequence; identical to SEQ ID NO: 53
  Description of Artificial Sequence: Synthetic peptide

SEQ ID NO: 58 - protein, 474 aa, Artificial Sequence
  Description of Artificial Sequence: Synthetic peptide
MQTLSIQHGTLVTMDQYRRVLGDSWVHVQDGRIVALGVHAESVPPPADRVIDARGKVVLPGFINAHTHVNQILLRGGPSHGRQFYDWLFNVLYPGQKAMRPEDVAVAVRLYCAEAVRSGITTINENADSAIYPGNIEAAMAVYGEVGVRVVYARMFFDRMDGRIQGYVDALKARSPQVELCSIMEETAVAKDRITALSDQYHGTAGGRISVWPAPAITPAVTVEGMRWAQAFARDRAVMWTLHMAESDHDERLHWMSPAEYMECYGLLDERLQVAHCVYFDRKDVRLLHRHNVKVASQVVSNAYLGSGVAPVPEMVERGMAVGIGTDDGNCNDSVNMIGDMKFMAHIHRAVHRDADVLTPEKILEMATIDGARSLGMDHEIGSIETGKRADLILLDLRHPQTTPHHHLAATIVFQAYGNEVDTVLIDGNVVMENRRLSFLPPERELAFLEEAQSRATAILQRANMVANPAWRSL

SEQ ID NO: 59 - protein, 474 aa, Artificial Sequence
  Description of Artificial Sequence: Synthetic peptide
MQTLSIQHGTLVTMDQYRRVLGDSWVHVQDGRIVALGVHAESVPPPADRVIDARGKVVLPGFINAHTHVNQILLRGGPSHGRQLYDWLFNVLYPGQKAMRPEDVAVAVRLYCAEAVRSGITTINDNADSAIYPGNIEAAMAVYGEVGVRVVYARMFFDRMDGRIQGYVDALKARSPQVELCSIMEETAVAKDRITALSDQYHGTAGGRISVWPAPATTTAVTVEGMRWAQAFARDRAVMWTLHMAESDHDERLHWMSPAEYMECYGLLDERLQVAHCVYFDRKDVRLLHRHNVKVASQVVSNAYLGSGVAPVPEMVERGMAVGIGTDDGNSNDSVNMIGDMKFMAHIHRAVHRDADVLTPEKILEMATIDGARSLGMDHEIGSIETGKRADLILLDLRHPQTTPHHHLAATIVFQAYGNEVDTVLIDGNVVMENRRLSFLPPERELAFLEEAQSRATAILQRANMVANPAWRSL

SEQ ID NO: 60 - protein, 474 aa, Artificial Sequence
  Description of Artificial Sequence: Synthetic peptide
MQTLSIQHGTLVTMDQYRRVLGDSWVHVQDGRIVALGVHAESVPPPADRVIDARGKVVLPGFINAHTHVNQILLRGGPSHGRQFYDWLFNVVYPGQKAMRPEDVAVAVRLYCAEAVRSGITTINENADSAIYPGNIEAAMAVYGEVGVRVVYARMFFDRMDGRIQGYVDALEARSPQVELCSIMEETAVAKDRITALSDQYHGTAGGRISVWPAPATTTAVTVEGMRWAQAFARDRAVMWTLHMAESDHDERLHWMSPAEYMECYGLLDERLQVAHCVYFDRKDVRLPHRHNVKVASQVVSNAYLGSGVAPVPEMVERGMAVGIGTDNGNSNDSVNMIGDMKFMAHIHRAVHRDADVLTPEKILEMATIDGARSLGMDHEIGSIETGKRADLILLDLRHPQTTPHHHLAATIVFQAYGNEVDTVLIDGNVVMENRRLSFLPPERELAFLEEAQSRATAILQRANMVANPAWRSL

SEQ ID NO: 61 - protein, 474 aa, Artificial Sequence
  Description of Artificial Sequence: Synthetic peptide
MQTLSIQHGTLVTMDQYRRVLGDSWVHVQDGRIVALGVHAESVPPPADRVIDARGKVVLPGFINAHTHVNQILLRGGPSHGRQFYDWLFNVVYPGQKAMRPEDVAVAVRLYCAEAVRSGITTINENADSAIYPGNIEAAMAVYGEVGVRVVYARMFFDRMDGRIQGYVDALKARSPQVELCSIMEETAVAKDRITALSDQYHGTAGGRISVWPAPATTTAVTVEGMRWAQAFARDRAVMWTLHMAESDHDERIHGMSPAEYMECYGLLDERLQVAHCVYFDRKDVRLLHRHNVKVASQVVSNAYLGSGVAPVPEMVERGMAVGIGTDDGNCNDSVNMIGDMKFMAHIHRAVHRDADVLTPEKILEMATIDGARSLGMDHEIGSIETGKRADLILLDLRHPQTTPHHHLAATIVFQAYGNEVDTVLIDGNVVMENRRLSFLPPERELAFLEEAQSRATAILQRANMVANPAWRSL

SEQ ID NO: 62 - protein, 474 aa, Artificial Sequence; identical to SEQ ID NO: 61
  Description of Artificial Sequence: Synthetic peptide

SEQ ID NO: 63 - protein, 474 aa, Artificial Sequence
  Description of Artificial Sequence: Synthetic peptide
MQTLSIQHGTLVTMDQYRRVLGDSWVHVQDGRIVALGVHAESVPPPADRVIDARGKVVLPGFINAHTHVNQILLRGGPSHGRQFYDWLFNVVYPGQKAMRPEDVAVAVRLYCAEAVRSGITTINENADSAIYPGNIEAAMAVYGEVGVRVVYARMFFDRMDGRIQGYVDALKARSPQVELCSIMEETAVAKDRITALSDQYHGTAGGRISVWPAPATTTAVTVEGMRWAQAFARDRAVMWTLHMAESDHDERLHWMSPAEYMECYGLLDERLQVAHCVYFDRKDVRLLHRHNVKVASQVVSNAYLGSGVAPVPEMVERGMAVGIGTDDGNCNDSVNMIGDMKFMAHIHRAVHRDADVLTPEKILEMATIDGARSLGMDHEIGSIETGKRADLVLLDLRHPQTTPHHHLAATIVFQAYGNEVDTVLIDGNVVMENRRLSFLPPERELAFLEEAQSRATAILQRANMVANPAWRSL

SEQ ID NO: 64 - protein, 474 aa, Artificial Sequence
  Description of Artificial Sequence: Synthetic peptide
MQTLSIQHGTLVTMDQYRRVLGDSWVHVQDGRIVALGVHAESVPPPADRVIDARGKVVLPGFINAHTHVNQILLRGGPSHGRQFYDWLFNVVYPGQKAMRPEDVAVAVRLYCAEAVRSGITTINENADSAIYPGNIEAAMAVYGEVGVRVVYARMFFDRMDGRIQGYVDALKARSPQVELCSIMEETAVAKDRITALSDQYHGTAGGRISVWPAPATTTAVTVEGMRWAQAFARDRAVMWTLHMAESDHDGRLHGMSPAEYMECYGLLDERLQVAHCVYFDRKDVRLLHRHNVKVASQVVSNAYLGSGVAPVPEMVERGMAVGIGTDNGNSNDSVNMIGDMKFMAHIHRAVHRDADVLTPEKILEMATIDGARSLGMDHEIGSIETGKRADLILLDLRHPQTTPHHHLAATIVFQAYGNEVDTVLIDGNVVMENRRLSFLPPERELAFLEEAQSRATAILQRANMVANPAWRSL

SEQ ID NO: 65 - protein, 474 aa, Artificial Sequence
  Description of Artificial Sequence: Synthetic peptide
MQTLSIQHGTLVTMDQYRRVLGDSWVHVQDGRIVALGVHAESVPPPADRVIDARGKVVLPGFINAHTHVNQILLRGGPSHGRQLYDWLFNVLYPGQKAMRPEDVAVAVRLYCAEAVRSGITTINENADSAIYPGNIEAAMAVYGEVGVRVVYARMFFDRMDGRIQGYVDALKARSPQVELCSIMEETAVAKDRITALSDQYHGTAGGRISVWPAPATTTAVTVEGMRWAQAFARDRAVMWTLHMAESDHDERLHWMSPAEYMECYGLLDERLQVAHCVYFDRKDVRLLHRHNVKVASQVVSNAYLGSGVAPVPEMVERGMAVGIGTDDGNCNDSVNMIGDMKFMAHIHRAVHRDADVLTPEKILEMATIDGARSLGMDHEIGSIETGKRADLILLDLRHPQTTPHHHLAATIVFQAYGNEVDTVLIDGNVVMENRRLSFLPPERELAFLEEAQSRATAILQRANMVANPAWRSL

SEQ ID NO: 66 - protein, 474 aa, Artificial Sequence
  Description of Artificial Sequence: Synthetic peptide
MQTLSIQHGTLVTMDQYRRVLGDSWVHVQDGRIVALGVHAESVPPPADRVIDARGKVVLPGFINAHTHVNQILLRGGPSHGRQFYDWLFNVLYPGQKAMRPEDVAVAVRLYCAEAVRSGITTINENADSAIYPGNIEAAMAVYGEVGVRVVYARMFFDRMDGRIQGYVDALKARSPQVELCSIMEETAVAKDRITALSDQYHGTAGGRISVWPAPATTTAVTVEGMRWAQAFARDRAVMWTLHMAESDHDERIHGMSPAEYMECYGLLDERLQVAHCVYFDRKDVRLLHRHNVKVASQVVSNAYLGSGVAPVPEMVERGMAVGIGTDDGNCNDSVNMIGDMKFMAHIHRAVHRDADVLTPEKILEMATIDGARSLGMDHEIGSIETGKRADLILLDLRHPQTTPHHHLAATIVFQAYGNEVDTVLIDGNVVMENRRLSFLPPERELAFLEEAQSRATAILQRANMVANPAWRSL

SEQ ID NO: 67 - protein, 474 aa, Artificial Sequence
  Description of Artificial Sequence: Synthetic peptide
MQTLSIQHGTLVTMDQYRRVLGDSWVHVQDGRIVALGVHAESVPPPADRVIDARGKVVLPGFINAHTHVNQILLRGGPSHGRQFYDWLFNVLYPGQKAMRPEDVAVAVRLYCAEAVRSGITTINENADSAIYPGNIEAAMAVYGEVGVRVVYARMFFDRMDGRIQGYVDALKARSPQVELCSIMEETAVAKDRITALSDQYHGTAGGRISVWPAPATTTAVTVEGMRWAQAFARDRAVMWTLHMAESDHDERLHWMSPAEYMECYGLLDERLQVAHCVYFDRKDVRLLHRHNVKVASQVVSNAYLGSGVAPVPEMVERGMAVGIGTDDGNCNDSVNMIGDMKFMAHIHRAVHRDADVLTPEKILEMATIDGARSLGMDHEIGSIETGKRADLILLDLRHPQTTPHHHLAATIVFQAYGNEVDTVLIDGNVVMENRRLSFLPPERELAFLEEAQSRATAILQRANMVANPAWRSL

SEQ ID NO: 68 - protein, 474 aa, Artificial Sequence; identical to SEQ ID NO: 66
  Description of Artificial Sequence: Synthetic peptide

SEQ ID NO: 69 - protein, 474 aa, Artificial Sequence
  Description of Artificial Sequence: Synthetic peptide
MQTLSIQHGTLVTMDQYRRVLGDSWVHVQDGRIVALGVHAESVPPPADRVIDARGKVVLPGFINAHTHVNQILLRGGPSHGRQFYDWLFNVVYPGQKAMRPEDVAVAVRLYCAEAVRSGITTINENADSAIYPGNIEAAMAVYGEVGVRVVYARMFFDRMDGRIQGYVDALKARSPQVELCSIMEETAVAKDRITALSDQYHGTAGGRISVWPAPATTTAVTVEGMRWAQAFARDRAVMWTLHMAESDHDERIHGMSPAEYMECYGLLDERLQVAHCVYFDRKDVRLLHRHNVKVASQVVSNAYLGSGVAPVPEMVERGMAVGIGTDDGNCNDSVNMIGDMKFMAHIHRAVHRDADVLTPEKILEMATIDGARSLGMDHEIGSIETGKRADLILLDLRHPQTTPHHHLAATIVFQAYGNEVDTVLIDGNVVMENRRLSFLPPERELAFLEEARSRATAILQRANMVANPAWRSL

SEQ ID NO: 70 - protein, 474 aa, Artificial Sequence
  Description of Artificial Sequence: Synthetic peptide
MQTLSIQHGTLVTMDQYRRVLGDSWVHVQDGRIVALGVHAESVPPPADRVIDARGKVVLPGFINAHTHVNQILLRGGPSHGRQLYDWLFNVLYPGQKAMRPEDVAVAVRLYCAEAVRSGITTINENADSAIYPGNIEAAMAVYGEVGVRVVYARMFFDRMDGRIQGYVDALKARSPQVELCSIMEETAVAKDRITALSDQYHGTAGGRISVWPAPATTTAVTVEGMRWAQAFARDRAVMWTLHMAESDHDERLHGMSPAEYMECYGLLDERLQVAHCVYFDRKDVRLLHRHNVKVASQVVSNAYLGSGVAPVPEMVERGMAVGIGTDDGNCNDSVNMIGDMKFMAHIHRAVHRDADVLTPEKILEMATIDGARSLGMDHEIGSIEIGKRADLILLDLRHPQTTPHHHLAATIVFQAYGNEVDTVLIDGNVVMENRRLSFLPPERELAFLEEAQSRATAILQRANIVANPAWRSL

SEQ ID NO: 71 - protein, 474 aa, Artificial Sequence
  Description of Artificial Sequence: Synthetic peptide
MQTLSIQHGTLVTMDQYRRVLGDSWVHVQDGRIVALGVHAESVPPPADRVIDARGKVVLPGFINAHTHVNQILLRGGPSHGRQLYDWLFNVAYPGQKAMRPEDVAVAVRLYCAEAVRSGITTINENADSAIYPGNIEAAMAVYGEVGVRVVYARMFFDRMDGRIQGYVDALKARSPQVELCSIMEETAVAKDRITALSDQYHGTAGGRISVWPAPATTTAVTVEGMRWAQAFARDRAVMWTLHMAESDHDERLHWMSPAEYMECYGLLDERLQVAHCVYFDRKDVRLLHRHNVKVASQVVSNAYLGSGVAPVPEMVERGMAVGIGTDDGNCNDSVNMIGDMKFMAHIHRAVHRDADVLTPEKILEMATIDGARSLGMDHEIGSIETGKRADLILLDLRHPQTTPHHHLAATIVFQAYGNEVDTVLIDGNVVMENRRLSFLPPERELAFLEEAQSRATAILQRANMVANPAWRSL

SEQ ID NO: 72 - protein, 474 aa, Artificial Sequence
  Description of Artificial Sequence: Synthetic peptide
MQTLSIQHGTLVTMDQYRRVLGDSWVHVQDGRIVALGVHAESVPPPADRVIDARGKVVLPGFINAHTHVNQILLRGGPSHGRQFYDWLFNVVYPGQKAMRPEDVAVAVRLYCAEAVRSGITTINDNADSAIYPGNIEAAMAVYGEVGVRVVYARMFFDRMDGRIQGYVDALKARSPQVELCSIMEETAVAKDRITALSDQYHGTAGGRISVWPAPATTTAVTVEGMRWAQAFARDRAVMWTLHMAESDHDERLHWMSPAEYMECYGLLDERLQVAHCVYFDRKDVRLLHRHNVKVASQVVSNAYLGSGVAPVPEMVERGMAVGIGTDNGNSNDSVNMIGDMKFMAHIHRAVHRDADVLTPEKILEMATIDGARSLGMDHEIGSIETGKRADLILLDLRHPQTTPHHHLAATIVFQAYGNEVDTVLIDGNVVMENRRLSFLPPERELAFLEEAQSRATAILQRANMVANPAWRSL

SEQ ID NO: 73 - protein, 474 aa, Artificial Sequence; identical to SEQ ID NO: 65
  Description of Artificial Sequence: Synthetic peptide

SEQ ID NO: 74 - protein, 474 aa, Artificial Sequence; identical to SEQ ID NO: 65
  Description of Artificial Sequence: Synthetic peptide

SEQ ID NO: 75 - protein, 474 aa, Artificial Sequence; identical to SEQ ID NO: 66
  Description of Artificial Sequence: Synthetic peptide

SEQ ID NO: 76 - protein, 474 aa, Artificial Sequence
  Description of Artificial Sequence: Synthetic peptide
MQTLSIQHGTLVTMDQYRRVLGDSWVHVQDGRIVALGVHAESVPPPADRVIDARGKVVLPGFINAHTHVNQILLRGGPSHGRQLYDWLFNVLYPGQKAMRPEDVAVAVRLYCAEAVRSGITTINENADSAIYPGNIEAAMAVYGEVGVRVVYARMFFDRMDGRIQGYVDALKARSPQVELCSIMEETAVAKDRITALSDQYHGTAGGRISVWPAPATTTAVTVEGMRWAQAFARDRAVMWTLHMAESDHDERIHGMSPAEYMECYGLLDERLQVAHCVYFDRKDVRLLHRHNVKVASQVVSNAYLGSGVAPVPEMVERGMAVGIGTDDGNCNDSVNMIGDMKFMAHIHRAVHRDADVLTPEKILEMATIDGARSLGMDHEIGSIETGKRADLILLDLRHPQTTPHHHLAATIVFQAYGNEVDTVLIDGNVVMENRRLSFLPPERELAFLEEAQSRATAILQRANMVANPAWRSL

SEQ ID NO: 77 - protein, 474 aa, Artificial Sequence; identical to SEQ ID NO: 65
  Description of Artificial Sequence: Synthetic peptide

SEQ ID NO: 78 - protein, 474 aa, Artificial Sequence
  Description of Artificial Sequence: Synthetic peptide
MQTLSIQHGTLVTMDQYRRVLGDSWVHVQDGRIVALGVHAESVPPPADRVIDARGKVVLPGFINAHTHVNQILLRGGPSHGRQLYDWLFNVVYPGQKAMRPEDVAVAVRLYCAEAVRSGITTINENADSAIYPGNIEAAMAVYGEVGVRVVYARMFFDRMDGRIQGYVDALKARSPQVELCSIMEETAVAKDRITALSDQYHGTAGGRISVWPAPATTTAVTVEGMRWAQAFARDRAVMWTLHMAESDHDERIHGMSPAEYMECYGLLDERLQVAHCVYFDRKDVRLLHRHNVKVASQVVSNAYLGSGVAPVPEMVERGMAVGIGTDDGNCNDSVNMIGDMKFMAHIHRAVHRDADVLTPEKILEMATIDGARSLGMDHEIGSIETGKRADLILLDLRHPQTTPHHHLAATIVFQAYGNEVDTVLIDGNVVMENRRLSFLPPERELAFLEEAQSRATAILQRANMVANPAWRSL

SEQ ID NO: 79 - protein, 474 aa, Artificial Sequence
  Description of Artificial Sequence: Synthetic peptide
MQTLSIQHGTLVTMDQYRRVLGDSWVHVQDGRIVALGVHAESVPPPADRVIDARGKVVLPGFINAHTHVNQILLRGGPSHGRQLYDWLFNVVYPGQKAMRPEDVAVAVRLYCAEAVRSGITTINENADSAIYPGNIEAAMAVYGEVGVRVVYARMFFDRMDGRIQGYVDALKARSPQVELCSIMEETAVAKDRITALSDQYHGTAGGRISVWPAPATTTAVTVEGMRWAQAFARDRAVMWTLHMAESDHDERLHWMSPAEYMECYGLLDERLQVAHCVYFDRKDVRLLHRHNVKVASQVVSNAYLGSGVAPVPEMVERGMAVGIGTDDGNCNDSVNMIGDMKFMAHIHRAVHRDADVLTPEKILEMATIGGARSLGMDHEIGSIETGKRADLILLDLRHPQTTPHHHLAATIVFQAYGNEVDTVLIDGNVVMENRRLSFLPPERELAFLEEAQSRATAILQRANMVANPAWRSL

SEQ ID NO: 80 - protein, 474 aa, Artificial Sequence
  Description of Artificial Sequence: Synthetic peptide
MQTLSIQHGTLVTMDQYRRVLGDSWVHVQDGRIVALGVHAESVPPPADRVIDARGKVVLPGFINAHTHVNQILLRGGPSHGRQLYDWLFNVVYPGQKAMRPEDVAVAVRLYCAEAVRSGITTINENADSAIYPGNIEAAMAVYGEVGVRVVYARMFFDRMDGRIQGYVDALKARSPQVELCSIMEETAVAKDRITALSDQYHGTAGGRISVWPAPATTTAVTVEGMRWAQAFARDRAVMWTLHMAESDHDERIHGMSPAEYMECYGLLDEHLQVAHCVYFDRKDVRLLHRHNVKVASQVVSNAYLGSGVAPVPEMVERGMAVGIGTDDGNSNDSVNMIGDMKFMAHIHRAVHRDADVLTPEKILEMATIDGARSLGMDHEIGSIETGKRADLILLDLRHPQTTPHHHLAATIVFQAYGNEVDTVLIDGNVVMENRRLSFLPPERELAFLEEAQSRATAILQRANMVANPAWRSL

SEQ ID NO: 81 - protein, 474 aa, Artificial Sequence
  Description of Artificial Sequence: Synthetic peptide
MQTLSIQHGTLVTMDQYRRVLGDSWVHVQDGRIVALGVHAESVPPPADRVIDARGKVVLPGFINAHTHVNQILLRGGPSHGRQLYDWLFNVVYPGQKAMRPEDVAVAVRLYCAEAVRSGITTINENADSAIYPGNIEAAMAVYGEVGVRVVYARMFFDRMDGRIQGYVDALKARSPQVELCSIMEETAVAKDRITALSDQYHGTAGGRISVWPAPATTTAVTVEGMRWAQAFARDRAVMWTLHMAESDHDERIHGMSPAEYMECYGLLDERLQVAHCVYFDRKDVRLLHRHNVKVASQVVSNAYLGSGVAPVPEMVERGMAVGIGTDDGNSNDSVNMIGDMKFMAHIHRAVHRDADVLTPEKILEMATIDGARSLGMDHEIGSIETGKRADLILLDLRHPQTTPHHHLAATIVFQAYGNEVDTVLIDGNVVMENRRLSFLPPERELAFLEEAQSRATAILQRANMVANPAWRSL

SEQ ID NO: 82 - protein, 474 aa, Artificial Sequence; identical to SEQ ID NO: 61
  Description of Artificial Sequence: Synthetic peptide

SEQ ID NO: 83 - protein, 474 aa, Artificial Sequence; identical to SEQ ID NO: 76
  Description of Artificial Sequence: Synthetic peptide

SEQ ID NO: 84 - protein, 474 aa, Artificial Sequence
  Description of Artificial Sequence: Synthetic peptide
MQTLSIQHGTLVTMDQYRRVLGDSWVHVQGGRIVALGVHAESVPPPADRVIDARGKVVLPGFINAHTHVNQILLRGGPSHGRQLYDWLFNVVYPGQKAMRPEDVAVAVRLYCAEAVRSGITTINENADSAIYPGNIEAAMAVYGEVGVRVVYARMFFDRVDGRIQGYVDALKARSPQVELCSIMEETAVAKDRITALSDQYHGTAGGRISVWPAPATTTAVTVEGMRWAQAFARDRAVMWTLHMAESDHDERIHGMSPAEYMECYGLLDERLQVAHCVYFDRKDVRLLHRHNVKVASQVVSNAYLGSGVAPVPEMVERGMAVGIGTDDGNCNDSVNMIGDMKFMAHIHRAVHRDADVLTPEKILEMATIDGARSLGMDHEIGSIETGKRADLILLDLRHPQTTPHHHLAATIVFQAYGNEVDTVLIDGNVVMENRRLSFLPPERELAFLEEAQSRATAILQRANMVANPAWRSL

SEQ ID NO: 85 - protein, 474 aa, Artificial Sequence; identical to SEQ ID NO: 59
  Description of Artificial Sequence: Synthetic peptide

SEQ ID NO: 86 - protein, 474 aa, Artificial Sequence; identical to SEQ ID NO: 66
  Description of Artificial Sequence: Synthetic peptide

SEQ ID NO: 87 - protein, 474 aa, Artificial Sequence; identical to SEQ ID NO: 76
  Description of Artificial Sequence: Synthetic peptide

SEQ ID NO: 88 - protein, 474 aa, Artificial Sequence
  Description of Artificial Sequence: Synthetic peptide
MQTLSIQHGTLVTMDQYRRVLGDSWVHVQDGRIVALGVHAESVPPPADRVIDARGKVVLPGFINAHTHVNQILLRGGPSHGRQFYDWLFNVVYPGQKAMRPEDVAVAVRLYCAEAVRSGITTINENADSAIYPGNIEAAMAVYGEVGVRVVYARMFFDRMDGRIQGYVDALKARSPQVELCSIMEETAVAKDRITALSDQYHGTAGGRISVWPAPATTTAVTVEGMRWAQAFARDRAVMWTLHMAESDHDERIHGMSPAEYMECYGLLDERLQVAHCVYFDRKDVRLLHRHNVKVASQVVSNAYLGSGVAPVPEMVERGMAVGIGTDNGNSNDSVNMIGDMKFMAHIHRAVHRDADVLTPEKILEMATIDGARSLGMDHEIGSIETGKRADLILLDLRHPQTTPHHHLAATIVFQAYGNEVDTVLIDGNVVMENRRLSFLPPERELAFLEEAQSRATAILQRANMVANPAWRSL

SEQ ID NO: 89 - protein, 474 aa, Artificial Sequence
  Description of Artificial Sequence: Synthetic peptide
MQTLSIQHGTLVTMDQYRRVLGDSWVHVQDGRIVALGVHAESVPPPADRVIDARGKVVLPGFINAHTHVNQILLRGGPSHGRQFYDWLFNVVYPGQKAMRPEDVAVAVRLYCAEAVRSGITTINDNADSAIYPGNIEAAMAVYGEVGVRVVYARMFFDRMDGRIQGYVDALKARSPQVELCSIMEETAVAKDRITALSDQYHGTAGGRISVWPAPAITPAVTVEGMRWAQAFARDRAVMWTLHMAESDHDERLHWMSPAEYMECYGLLDERLQVAHCVYFDRKDVRLLHRHNVKVASQVVSNAYLGSGVAPVPEMVERGMAVGIGTDDGNCNDSVNMIGDMKFMAHIHRAVHRDADVLTPEKILEMATIDGARSLGMDHEIGSIETGKRADLILLDLRHPQTTPHHHLAATIVFQAYGNEVDTVLIDGNVVMENRRLSFLPPERELAFLEEAQSRATAILQRANMVANPAWRSL

SEQ ID NO: 90 - protein, 474 aa, Artificial Sequence; identical to SEQ ID NO: 66
  Description of Artificial Sequence: Synthetic peptide

SEQ ID NO: 91 - protein, 474 aa, Artificial Sequence
  Description of Artificial Sequence: Synthetic peptide
MQTLSIQHGTLVTMDQYRRVLGDSWVHVQDGRIVALGVHAESVPPPADRVIDARGKVVLPGFINAHTHVNQILLRGGPSHGRQLYDWLFNVVYPGQKAMRPEDVAVAVRLYCAEAVRSGITTINDNADSAIYPGNIEAAMAVYGEVGVRVVYARMFFDRMDGRIQGYVDALKARSPQVELCSIMEETAVAKDRITALSDQYHGTAGGRISVWPAPAITTAVTVEGMRWAQAFARDRAVMWTLHMAESDHDERLHWMSPAEYMECYGLLDERLQVAHCVYFDRKDVRLLHRHNVKVASQVVSNAYLGSGVAPVPEMVERGMAVGIGTDDGNSNDSVNMIGDMKFMAHIHRAVHRDADVLTPEKILEMATIDGARSLGMDHEIGSIETGKRADLILLDLRHPQTTPHHHLAATIVFQAYGNEVDTVLIDGNVVMENRRLSFLPPERELAFLEEAQSRATAILQRANMVANPAWRSL

SEQ ID NO: 92 - protein, 474 aa, Artificial Sequence
  Description of Artificial Sequence: Synthetic peptide
MQTLSIQHGTLVTMDQYRRVLGDSWVHVQDGRIVALGVHAESVPPPADRVIDARGKVVLPGFINAHTHVNQILLRGGPSHGRQLYDWLFNVGYPGQKAMRPEDVAVAVRLYCAEAVRSGITTINENADSAIYPGNIEAAMAVYGEVGVRVVYARMFFDRMDGRIQGYVDALKARSPQVELCSIMEETAVAKDRITALSDQYHGTAGGRISVWPAPATTTAVTVEGMRWAQAFARDRAVMWTLHMAESDHDERLHWMSPAEYMECYGLLDERLQVAHCVYFDRKDVRLLHRHNVKVASQVVSNAYLGSGVAPVPEMVERGMAVGIGTDDGNCNDSVNMIGDMKFMAHIHRAVHRDADVLTPEKILEMATIDGARSLGMDHEIGSIETGKRADLILLDLRHPQTTPHHHLAATIVFQAYGNEVDTVLIDGNVVMENRRLSFLPPERELAFLEEAQSRATAILQRANMVANPAWRSL

SEQ ID NO: 93 - protein, 474 aa, Artificial Sequence
  Description of Artificial Sequence: Synthetic peptide
MQTLSIQHGTLVTMDQYRRVLGDSWVHVQDGRIVALGVHAESVPPPADRVIDARGKVVLPGFINAHTHVNQILLRGGPSHGRQLYDWLFNVAYPGQKAMRPEDVAVAVRLYCAEAVRSGITTINENADSAIYPGNIEAAMAVYGEVGVRVVYARMFFDRMDGRIQGYVDALKARSPQVELCSIMEETAVAKDRITALSDQYHGTAGGRISVWPAPATTTAVTVEGMRWAQAFARDRAVMWTLHMAESDHDERLHWMSPAEYMECYGLLDERLQVAHCVYFDRKDVRLLHRHNVKVASQVVSNAYLGSGVAPVPEMVERGMAVGIGTDNGNSNDSVNMIGDMKFMAHIHRAVHRDADVLTPEKILEMATIDGARSLGMDHEIGSIETGKRADLILLDLRHPQTTPHHHLAATIVFQAYGNEVDTVLIDGNVVMENRRLSFLPPERELAFLEEAQSRATAILQRANMVANPAWRSL

SEQ ID NO: 94 - protein, 474 aa, Artificial Sequence; identical to SEQ ID NO: 93
  Description of Artificial Sequence: Synthetic peptide

SEQ ID NO: 95 - protein, 474 aa, Artificial Sequence
  Description of Artificial Sequence: Synthetic peptide
MQTLSIQHGTLVTMDQYRRVLGDSWVHVQDGRIVALGVHAESVPPPADRVIDARGKVVLPGFINAHTHVNQILLRGGPSHGRQLYDWLFNVAYPGQKAMRPEDVAVAVRLYCAEAVRSGITTINENADSAIYPGNIEAAMAVYGEVGVRVVYARMFFDRMDGRIQGYVDALKARSPQVELCSIMEETAVAKDRITALSDQYHGTAGGRISVWPAPATTTAVTVEGMRWAQAFARDRAVMWTLHMAESDHDERLHWMSPAEYMECYGLLDERLQVAHCVYFDRKDVRLLHRHNVKVASQVVSNAYLGSGVAPVPEMVERGMAVGIGTDNGNCNDSVNMIGDMKFMAHIHRAVHRDADVLTPEKILEMATIDGARSLGMDHEIGSIETGKRADLILLDLRHPQTTPHHHLAATIVFQAYGNEVDTVLIDGNVVMENRRLSFLPPERELAFLEEAQSRATAILQRANMVANPAWRSL

SEQ ID NO: 96 - protein, 474 aa, Artificial Sequence
  Description of Artificial Sequence: Synthetic peptide
MQTLSIQHGTLVTMDQYRRVLGDSWVHVQDGRIVALGVHAESVPPPADRVIDARGKVVLPGFINAHTHVNQILLRGGPSHGRQLYDWLFNVGYPGQKAMRPEDVAVAVRLYCAEAVRSGITTINENADSAIYPGNIEAAMAVYGEVGVRVVYARMFFDRMDGRIQGYVDALKARSPQVELCSIMEETAVAKDRITALSDQYHGTAGGRISVWPAPATTTAVTVEGMRWAQAFARDRAVMWTLHMAESDHDERLHWMSPAEYMECYGLLDERLQVAHCVYFDRKDVRLLHRHNVKVASQVVSNAYLGSGVAPVPEMVERGMAVGIGTDNGNCNDSVNMIGDMKFMAHIHRAVHRDADVLTPEKILEMATIDGARSLGMDHEIGSIETGKRADLILLDLRHPQTTPHHHLAATIVFQAYGNEVDTVLIDGNVVMENRRLSFLPPERELAFLEEAQSRATAILQRANMVANPAWRSL

SEQ ID NO: 97 - protein, 473 aa, Artificial Sequence
  Description of Artificial Sequence: Synthetic peptide
MQTLSIQHGTLVTMDQYRRVLGDSWVHVQDGRIVALGVHAESVPPPADRVIDARGKVVLPGFINAHTHVNQILLRGGPSHGRQFYDWLFNVLYPGQKAMRPEVAVAVRLYCAEAVRSGITTINEDADSAIYPGNIEAAMAVYGEVGVRVVYARMFFDRMDGRIQGYVDALKARSPQVELCSIMEETAVAKDRITALSDQYHGTAGGRISVWPAPATITPVTVEGMRWAQAFARDRAVMWTLHMAESDHDERIIGGSPAEYMECYGLLDERLQVAHCVYFDRKDVRLLHRHNVKVASQVVSNAYLGSGVAPVPEMVERGMAVGIGTDNDNSCDSVNMIGDMKFMAHIHRAVHRDADVLTPEKILEMATIDGARSLGMDHEIGSIETGKRADLILLDLRHPQTTPHHHLAATIVFQAYGNEVDTVLIDGNVVMENRRLSFLPPERELAFLEEAQSRATAILQRANMVANPAWRSL

SEQ ID NO: 98 - protein, 473 aa, Artificial Sequence
  Description of Artificial Sequence: Synthetic peptide
MQTLSIQHGTLVTMDQYRRVLGDSWVHVQDGRIVALGVHAESVPPPADRVIDARGKVVLPGFINAHTHVNQILLRGGPSHGRQFYDWLFNVLYPGQKAMRPEVAVAVRLYCAEAVRSGITTINEDADSAIYPGNIEAAMAVYGEVGVRVVYARMFFDRMDGRIQGYVDALKARSPQVELCSIMEETAVAKDRITALSDQYHGTAGGRISVWPAPATITPVTVEGMRWAQAFARDRAVMWTLHMAESDHDERIIGGSPAEYMECYGLLDERLQVAHCVYFDRKDVRLLHRHNVKVASQVVSNAYLGSGVAPVPEMVERGMAVGIGTDNDNSSDSVNMIGDMKFMAHIHRAVHRDADVLTPEKILEMATIDGARSLGMDHEIGSIETGKRADLILLDLRHPQTTPHHHLAATIVFQAYGNEVDTVLIDGNVVMENRRLSFLPPERELAFLEEAQSRATAILQRANMVANPAWRSL

SEQ ID NO: 99 - protein, 473 aa, Artificial Sequence
  Description of Artificial Sequence: Synthetic peptide
MQTLSIQHGTLVTMDQYRRVLGDSWVHVQDGRIVALGVHAESVPPPADRVIDARGKVVLPGFINAHTHVNQILLRGGPSHGRQFYDWLFNVLYPGQKAMRPEVAVAVRLYCAEAVRSGITTINEDADSAIYPGNIEAAMAVYGEVGVRVVYARMFFDRMDGRIQGYVDALKARSPQVELCSIMEETAVAKDRITALSDQYHGTAGGRISVWPAPATITPVTVEGMRWAQAFARDRAVMWTLHMAESDHDERIIGGSPAEYMECYGLLDERLQVAHCVYFDRKDVRLLHRHNVKVASQVVSNAYLGSGVAPVPEMVERGMAVGIGTDNNNSCDSVNMIGDMKFMAHIHRAVHRDADVLTPEKILEMATIDGARSLGMDHEIGSIETGKRADLILLDLRHPQTTPHHHLAATIVFQAYGNEVDTVLIDGNVVMENRRLSFLPPERELAFLEEAQSRATAILQRANMVANPAWRSL

SEQ ID NO: 100 - protein, 473 aa, Artificial Sequence
  Description of Artificial Sequence: Synthetic peptide
MQTLSIQHGTLVTMDQYRRVLGDSWVHVQDGRIVALGVHAESVPPPADRVIDARGKVVLPGFINAHTHVNQILLRGGPSHGRQFYDWLFNVLYPGQKAMRPEVAVAVRLYCAEAVRSGITTINEDADSAIYPGNIEAAMAVYGEVGVRVVYARMFFDRMDGRIQGYVDALKARSPQVELCSIMEETAVAKDRITALSDQYHGTAGGRISVWPAPATITPVTVEGMRWAQAFARDRAVMWTLHMAESDHDERIIGGSPAEYMECYGLLDERLQVAHCVYFDRKDVRLLHRHNVKVASQVVSNAYLGSGVAPVPEMVERGMAVGIGTDNNNSSDSVNMIGDMKFMAHIHRAVHRDADVLTPEKILEMATIDGARSLGMDHEIGSIETGKRADLILLDLRHPQTTPHHHLAATIVFQAYGNEVDTVLIDGNVVMENRRLSFLPPERELAFLEEAQSRATAILQRANMVANPAWRSL

SEQ ID NO: 101 - protein, 473 aa, Artificial Sequence
  Description of Artificial Sequence: Synthetic peptide
MQTLSIQHGTLVTMDQYRRVLGDSWVHVQDGRIVALGVHAESVPPPADRVIDARGKVVLPGFINAHTHVNQILLRGGPSHGRQFYDWLFNVLYPGQKAMRPEVAVAVRLYCAEAVRSGITTINEDADSAIYPGNIEAAMAVYGEVGVRVVYARMFFDRMDGRIQGYVDALKARSPQVELCSIMEETAVAKDRITALSDQYHGTAGGRISVWPAPATITPVTVEGMRWAQAFARDRAVMWTLHMAESDHDERIIGWSPAEYMECYGLLDERLQVAHCVYFDRKDVRLLHRHNVKVASQVVSNAYLGSGVAPVPEMVERGMAVGIGTDNDNSCDSVNMIGDMKFMAHIHRAVHRDADVLTPEKILEMATIDGARSLGMDHEIGSIETGKRADLILLDLRHPQTTPHHHLAATIVFQAYGNEVDTVLIDGNVVMENRRLSFLPPERELAFLEEAQSRATAILQRANMVANPAWRSL

SEQ ID NO: 102 - protein, 473 aa, Artificial Sequence
  Description of Artificial Sequence: Synthetic peptide
MQTLSIQHGTLVTMDQYRRVLGDSWVHVQDGRIVALGVHAESVPPPADRVIDARGKVVLPGFINAHTHVNQILLRGGPSHGRQFYDWLFNVLYPGQKAMRPEVAVAVRLYCAEAVRSGITTINEDADSAIYPGNIEAAMAVYGEVGVRVVYARMFFDRMDGRIQGYVDALKARSPQVELCSIMEETAVAKDRITALSDQYHGTAGGRISVWPAPATITPVTVEGMRWAQAFARDRAVMWTLHMAESDHDERIIGWSPAEYMECYGLLDERLQVAHCVYFDRKDVRLLHRHNVKVASQVVSNAYLGSGVAPVPEMVERGMAVGIGTDNDNSSDSVNMIGDMKFMAHIHRAVHRDADVLTPEKILEMATIDGARSLGMDHEIGSIETGKRADLILLDLRHPQTTPHHHLAATIVFQAYGNEVDTVLIDGNVVMENRRLSFLPPERELAFLEEAQSRATAILQRANMVANPAWRSL

SEQ ID NO: 103 - protein, 473 aa, Artificial Sequence
  Description of Artificial Sequence: Synthetic peptide
MQTLSIQHGTLVTMDQYRRVLGDSWVHVQDGRIVALGVHAESVPPPADRVIDARGKVVLPGFINAHTHVNQILLRGGPSHGRQFYDWLFNVLYPGQKAMRPEVAVAVRLYCAEAVRSGITTINEDADSAIYPGNIEAAMAVYGEVGVRVVYARMFFDRMDGRIQGYVDALKARSPQVELCSIMEETAVAKDRITALSDQYHGTAGGRISVWPAPATITPVTVEGMRWAQAFARDRAVMWTLHMAESDHDERIIGWSPAEYMECYGLLDERLQVAHCVYFDRKDVRLLHRHNVKVASQVVSNAYLGSGVAPVPEMVERGMAVGIGTDNNNSCDSVNMIGDMKFMAHIHRAVHRDADVLTPEKILEMATIDGARSLGMDHEIGSIETGKRADLILLDLRHPQTTPHHHLAATIVFQAYGNEVDTVLIDGNVVMENRRLSFLPPERELAFLEEAQSRATAILQRANMVANPAWRSL

SEQ ID NO: 104 - protein, 473 aa, Artificial Sequence
  Description of Artificial Sequence: Synthetic peptide
MQTLSIQHGTLVTMDQYRRVLGDSWVHVQDGRIVALGVHAESVPPPADRVIDARGKVVLPGFINAHTHVNQILLRGGPSHGRQFYDWLFNVLYPGQKAMRPEVAVAVRLYCAEAVRSGITTINEDADSAIYPGNIEAAMAVYGEVGVRVVYARMFFDRMDGRIQGYVDALKARSPQVELCSIMEETAVAKDRITALSDQYHGTAGGRISVWPAPATITPVTVEGMRWAQAFARDRAVMWTLHMAESDHDERIIGWSPAEYMECYGLLDERLQVAHCVYFDRKDVRLLHRHNVKVASQVVSNAYLGSGVAPVPEMVERGMAVGIGTDNNNSSDSVNMIGDMKFMAHIHRAVHRDADVLTPEKILEMATIDGARSLGMDHEIGSIETGKRADLILLDLRHPQTTPHHHLAATIVFQAYGNEVDTVLIDGNVVMENRRLSFLPPERELAFLEEAQSRATAILQRANMVANPAWRSL

SEQ ID NO: 105 - protein, 473 aa, Artificial Sequence
  Description of Artificial Sequence: Synthetic peptide
MQTLSIQHGTLVTMDQYRRVLGDSWVHVQDGRIVALGVHAESVPPPADRVIDARGKVVLPGFINAHTHVNQILLRGGPSHGRQFYDWLFNVLYPGQKAMRPEVAVAVRLYCAEAVRSGITTINEDADSAIYPGNIEAAMAVYGEVGVRVVYARMFFDRMDGRIQGYVDALKARSPQVELCSIMEETAVAKDRITALSDQYHGTAGGRISVWPAPATITPVTVEGMRWAQAFARDRAVMWTLHMAESDHDERILGGSPAEYMECYGLLDERLQVAHCVYFDRKDVRLLHRHNVKVASQVVSNAYLGSGVAPVPEMVERGMAVGIGTDNDNSCDSVNMIGDMKFMAHIHRAVHRDADVLTPEKILEMATIDGARSLGMDHEIGSIETGKRADLILLDLRHPQTTPHHHLAATIVFQAYGNEVDTVLIDGNVVMENRRLSFLPPERELAFLEEAQSRATAILQRANMVANPAWRSL

SEQ ID NO: 106 - protein, 473 aa, Artificial Sequence
  Description of Artificial Sequence: Synthetic peptide
MQTLSIQHGTLVTMDQYRRVLGDSWVHVQDGRIVALGVHAESVPPPADRVIDARGKVVLPGFINAHTHVNQILLRGGPSHGRQFYDWLFNVLYPGQKAMRPEVAVAVRLYCAEAVRSGITTINEDADSAIYPGNIEAAMAVYGEVGVRVVYARMFFDRMDGRIQGYVDALKARSPQVELCSIMEETAVAKDRITALSDQYHGTAGGRISVWPAPATITPVTVEGMRWAQAFARDRAVMWTLHMAESDHDERILGGSPAEYMECYGLLDERLQVAHCVYFDRKDVRLLHRHNVKVASQVVSNAYLGSGVAPVPEMVERGMAVGIGTDNDNSSDSVNMIGDMKFMAHIHRAVHRDADVLTPEKILEMATIDGARSLGMDHEIGSIETGKRADLILLDLRHPQTTPHHHLAATIVFQAYGNEVDTVLIDGNVVMENRRLSFLPPERELAFLEEAQSRATAILQRANMVANPAWRSL

SEQ ID NO: 107 - protein, 473 aa, Artificial Sequence
  Description of Artificial Sequence: Synthetic peptide
MQTLSIQHGTLVTMDQYRRVLGDSWVHVQDGRIVALGVHAESVPPPADRVIDARGKVVLPGFINAHTHVNQILLRGGPSHGRQFYDWLFNVLYPGQKAMRPEVAVAVRLYCAEAVRSGITTINEDADSAIYPGNIEAAMAVYGEVGVRVVYARMFFDRMDGRIQGYVDALKARSPQVELCSIMEETAVAKDRITALSDQYHGTAGGRISVWPAPATITPVTVEGMRWAQAFARDRAVMWTLHMAESDHDERILGGSPAEYMECYGLLDERLQVAHCVYFDRKDVRLLHRHNVKVASQVVSNAYLGSGVAPVPEMVERGMAVGIGTDNNNSCDSVNMIGDMKFMAHIHRAVHRDADVLTPEKILEMATIDGARSLGMDHEIGSIETGKRADLILLDLRHPQTTPHHHLAATIVFQAYGNEVDTVLIDGNVVMENRRLSFLPPERELAFLEEAQSRATAILQRANMVANPAWRSL

SEQ ID NO: 108 - protein, 473 aa, Artificial Sequence
  Description of Artificial Sequence: Synthetic peptide
MQTLSIQHGTLVTMDQYRRVLGDSWVHVQDGRIVALGVHAESVPPPADRVIDARGKVVLPGFINAHTHVNQILLRGGPSHGRQFYDWLFNVLYPGQKAMRPEVAVAVRLYCAEAVRSGITTINEDADSAIYPGNIEAAMAVYGEVGVRVVYARMFFDRMDGRIQGYVDALKARSPQVELCSIMEETAVAKDRITALSDQYHGTAGGRISVWPAPATITPVTVEGMRWAQAFARDRAVMWTLHMAESDHDERILGGSPAEYMECYGLLDERLQVAHCVYFDRKDVRLLHRHNVKVASQVVSNAYLGSGVAPVPEMVERGMAVGIGTDNNNSSDSVNMIGDMKFMAHIHRAVHRDADVLTPEKILEMATIDGARSLGMDHEIGSIETGKRADLILLDLRHPQTTPHHHLAATIVFQAYGNEVDTVLIDGNVVMENRRLSFLPPERELAFLEEAQSRATAILQRANMVANPAWRSL

SEQ ID NO: 109 - protein, 473 aa, Artificial Sequence
  Description of Artificial Sequence: Synthetic peptide
MQTLSIQHGTLVTMDQYRRVLGDSWVHVQDGRIVALGVHAESVPPPADRVIDARGKVVLPGFINAHTHVNQILLRGGPSHGRQFYDWLFNVLYPGQKAMRPEVAVAVRLYCAEAVRSGITTINEDADSAIYPGNIEAAMAVYGEVGVRVVYARMFFDRMDGRIQGYVDALKARSPQVELCSIMEETAVAKDRITALSDQYHGTAGGRISVWPAPATITPVTVEGMRWAQAFARDRAVMWTLHMAESDHDERILGWSPAEYMECYGLLDERLQVAHCVYFDRKDVRLLHRHNVKVASQVVSNAYLGSGVAPVPEMVERGMAVGIGTDNDNSCDSVNMIGDMKFMAHIHRAVHRDADVLTPEKILEMATIDGARSLGMDHEIGSIETGKRADLILLDLRHPQTTPHHHLAATIVFQAYGNEVDTVLIDGNVVMENRRLSFLPPERELAFLEEAQSRATAILQRANMVANPAWRSL

SEQ ID NO: 110 - protein, 473 aa, Artificial Sequence
  Description of Artificial Sequence: Synthetic peptide
MQTLSIQHGTLVTMDQYRRVLGDSWVHVQDGRIVALGVHAESVPPPADRVIDARGKVVLPGFINAHTHVNQILLRGGPSHGRQFYDWLFNVLYPGQKAMRPEVAVAVRLYCAEAVRSGITTINEDADSAIYPGNIEAAMAVYGEVGVRVVYARMFFDRMDGRIQGYVDALKARSPQVELCSIMEETAVAKDRITALSDQYHGTAGGRISVWPAPATITPVTVEGMRWAQAFARDRAVMWTLHMAESDHDERILGWSPAEYMECYGLLDERLQVAHCVYFDRKDVRLLHRHNVKVASQVVSNAYLGSGVAPVPEMVERGMAVGIGTDNDNSSDSVNMIGDMKFMAHIHRAVHRDADVLTPEKILEMATIDGARSLGMDHEIGSIETGKRADLILLDLRHPQTTPHHHLAATIVFQAYGNEVDTVLIDGNVVMENRRLSFLPPERELAFLEEAQSRATAILQRANMVANPAWRSL

SEQ ID NO: 111 - protein, 473 aa, Artificial Sequence
  Description of Artificial Sequence: Synthetic peptide
MQTLSIQHGTLVTMDQYRRVLGDSWVHVQDGRIVALGVHAESVPPPADRVIDARGKVVLPGFINAHTHVNQILLRGGPSHGRQFYDWLFNVLYPGQKAMRPEVAVAVRLYCAEAVRSGITTINEDADSAIYPGNIEAAMAVYGEVGVRVVYARMFFDRMDGRIQGYVDALKARSPQVELCSIMEETAVAKDRITALSDQYHGTAGGRISVWPAPATITPVTVEGMRWAQAFARDRAVMWTLHMAESDHDERILGWSPAEYMECYGLLDERLQVAHCVYFDRKDVRLLHRHNVKVASQVVSNAYLGSGVAPVPEMVERGMAVGIGTDNNNSCDSVNMIGDMKFMAHIHRAVHRDADVLTPEKILEMATIDGARSLGMDHEIGSIETGKRADLILLDLRHPQTTPHHHLAATIVFQAYGNEVDTVLIDGNVVMENRRLSFLPPERELAFLEEAQSRATAILQRANMVANPAWRSL

SEQ ID NO: 112 - protein, 473 aa, Artificial Sequence
  Description of Artificial Sequence: Synthetic peptide
MQTLSIQHGTLVTMDQYRRVLGDSWVHVQDGRIVALGVHAESVPPPADRVIDARGKVVLPGFINAHTHVNQILLRGGPSHGRQFYDWLFNVLYPGQKAMRPEVAVAVRLYCAEAVRSGITTINEDADSAIYPGNIEAAMAVYGEVGVRVVYARMFFDRMDGRIQGYVDALKARSPQVELCSIMEETAVAKDRITALSDQYHGTAGGRISVWPAPATITPVTVEGMRWAQAFARDRAVMWTLHMAESDHDERILGWSPAEYMECYGLLDERLQVAHCVYFDRKDVRLLHRHNVKVASQVVSNAYLGSGVAPVPEMVERGMAVGIGTDNNNSSDSVNMIGDMKFMAHIHRAVHRDADVLTPEKILEMATIDGARSLGMDHEIGSIETGKRADLILLDLRHPQTTPHHHLAATIVFQAYGNEVDTVLIDGNVVMENRRLSFLPPERELAFLEEAQSRATAILQRANMVANPAWRSL

SEQ ID NO: 113 - protein, 473 aa, Artificial Sequence
  Description of Artificial Sequence: Synthetic peptide
MQTLSIQHGTLVTMDQYRRVLGDSWVHVQDGRIVALGVHAESVPPPADRVIDARGKVVLPGFINAHTHVNQILLRGGPSHGRQFYDWLFNVLYPGQKAMRPEVAVAVRLYCAEAVRSGITTINEDADSAIYPGNIEAAMAVYGEVGVRVVYARMFFDRMDGRIQGYVDALKARSPQVELCSIMEETAVAKDRITALSDQYHGTAGGRISVWPAPATITTVTVEGMRWAQAFARDRAVMWTLHMAESDHDERIIGGSPAEYMECYGLLDERLQVAHCVYFDRKDVRLLHRHNVKVASQVVSNAYLGSGVAPVPEMVERGMAVGIGTDNDNSCDSVNMIGDMKFMAHIHRAVHRDADVLTPEKILEMATIDGARSLGMDHEIGSIETGKRADLILLDLRHPQTTPHHHLAATIVFQAYGNEVDTVLIDGNVVMENRRLSFLPPERELAFLEEAQSRATAILQRANMVANPAWRSL

SEQ ID NO: 114 - protein, 473 aa, Artificial Sequence
  Description of Artificial Sequence: Synthetic peptide
MQTLSIQHGTLVTMDQYRRVLGDSWVHVQDGRIVALGVHAESVPPPADRVIDARGKVVLPGFINAHTHVNQILLRGGPSHGRQFYDWLFNVLYPGQKAMRPEVAVAVRLYCAEAVRSGITTINEDADSAIYPGNIEAAMAVYGEVGVRVVYARMFFDRMDGRIQGYVDALKARSPQVELCSIMEETAVAKDRITALSDQYHGTAGGRISVWPAPATITTVTVEGMRWAQAFARDRAVMWTLHMAESDHDERIIGGSPAEYMECYGLLDERLQVAHCVYFDRKDVRLLHRHNVKVASQVVSNAYLGSGVAPVPEMVERGMAVGIGTDNDNSSDSVNMIGDMKFMAHIHRAVHRDADVLTPEKILEMATIDGARSLGMDHEIGSIETGKRADLILLDLRHPQTTPHHHLAATIVFQAYGNEVDTVLIDGNVVMENRRLSFLPPERELAFLEEAQSRATAILQRANMVANPAWRSL

SEQ ID NO: 115 - protein, 473 aa, Artificial Sequence
  Description of Artificial Sequence: Synthetic peptide
MQTLSIQHGTLVTMDQYRRVLGDSWVHVQDGRIVALGVHAESVPPPADRVIDARGKVVLPGFINAHTHVNQILLRGGPSHGRQFYDWLFNVLYPGQKAMRPEVAVAVRLYCAEAVRSGITTINEDADSAIYPGNIEAAMAVYGEVGVRVVYARMFFDRMDGRIQGYVDALKARSPQVELCSIMEETAVAKDRITALSDQYHGTAGGRISVWPAPATITTVTVEGMRWAQAFARDRAVMWTLHMAESDHDERIIGGSPAEYMECYGLLDERLQVAHCVYFDRKDVRLLHRHNVKVASQVVSNAYLGSGVAPVPEMVERGMAVGIGTDNNNSCDSVNMIGDMKFMAHIHRAVHRDADVLTPEKILEMATIDGARSLGMDHEIGSIETGKRADLILLDLRHPQTTPHHHLAATIVFQAYGNEVDTVLIDGNVVMENRRLSFLPPERELAFLEEAQSRATAILQRANMVANPAWRSL

SEQ ID NO: 116 - protein, 473 aa, Artificial Sequence
  Description of Artificial Sequence: Synthetic peptide
MQTLSIQHGTLVTMDQYRRVLGDSWVHVQDGRIVALGVHAESVPPPADRVIDARGKVVLPGFINAHTHVNQILLRGGPSHGRQFYDWLFNVLYPGQKAMRPEVAVAVRLYCAEAVRSGITTINEDADSAIYPGNIEAAMAVYGEVGVRVVYARMFFDRMDGRIQGYVDALKARSPQVELCSIMEETAVAKDRITALSDQYHGTAGGRISVWPAPATITTVTVEGMRWAQAFARDRAVMWTLHMAESDHDERIIGGSPAEYMECYGLLDERLQVAHCVYFDRKDVRLLHRHNVKVASQVVSNAYLGSGVAPVPEMVERGMAVGIGTDNNNSSDSVNMIGDMKFMAHIHRAVHRDADVLTPEKILEMATIDGARSLGMDHEIGSIETGKRADLILLDLRHPQTTPHHHLAATIVFQAYGNEVDTVLIDGNVVMENRRLSFLPPERELAFLEEAQSRATAILQRANMVANPAWRSL

SEQ ID NO: 117 - protein, 473 aa, Artificial Sequence
  Description of Artificial Sequence: Synthetic peptide
MQTLSIQHGTLVTMDQYRRVLGDSWVHVQDGRIVALGVHAESVPPPADRVIDARGKVVLPGFINAHTHVNQILLRGGPSHGRQFYDWLFNVLYPGQKAMRPEVAVAVRLYCAEAVRSGITTINEDADSAIYPGNIEAAMAVYGEVGVRVVYARMFFDRMDGRIQGYVDALKARSPQVELCSIMEETAVAKDRITALSDQYHGTAGGRISVWPAPATITTVTVEGMRWAQAFARDRAVMWTLHMAESDHDERIIGWSPAEYMECYGLLDERLQVAHCVYFDRKDVRLLHRHNVKVASQVVSNAYLGSGVAPVPEMVERGMAVGIGTDNDNSCDSVNMIGDMKFMAHIHRAVHRDADVLTPEKILEMATIDGARSLGMDHEIGSIETGKRADLILLDLRHPQTTPHHHLAATIVFQAYGNEVDTVLIDGNVVMENRRLSFLPPERELAFLEEAQSRATAILQRANMVANPAWRSL

SEQ ID NO: 118 - protein, 473 aa, Artificial Sequence
  Description of Artificial Sequence: Synthetic peptide
MQTLSIQHGTLVTMDQYRRVLGDSWVHVQDGRIVALGVHAESVPPPADRVIDARGKVVLPGFINAHTHVNQILLRGGPSHGRQFYDWLFNVLYPGQKAMRPEVAVAVRLYCAEAVRSGITTINEDADSAIYPGNIEAAMAVYGEVGVRVVYARMFFDRMDGRIQGYVDALKARSPQVELCSIMEETAVAKDRITALSDQYHGTAGGRISVWPAPATITTVTVEGMRWAQAFARDRAVMWTLHMAESDHDERIIGWSPAEYMECYGLLDERLQVAHCVYFDRKDVRLLHRHNVKVASQVVSNAYLGSGVAPVPEMVERGMAVGIGTDNDNSSDSVNMIGDMKFMAHIHRAVHRDADVLTPEKILEMATIDGARSLGMDHEIGSIETGKRADLILLDLRHPQTTPHHHLAATIVFQAYGNEVDTVLIDGNVVMENRRLSFLPPERELAFLEEAQSRATAILQRANMVANPAWRSL

SEQ ID NO: 119 - protein, 473 aa, Artificial Sequence
  Description of Artificial Sequence: Synthetic peptide
MQTLSIQHGTLVTMDQYRRVLGDSWVHVQDGRIVALGVHAESVPPPADRVIDARGKVVLPGFINAHTHVNQILLRGGPSHGRQFYDWLFNVLYPGQKAMRPEVAVAVRLYCAEAVRSGITTINEDADSAIYPGNIEAAMAVYGEVGVRVVYARMFFDRMDGRIQGYVDALKARSPQVELCSIMEETAVAKDRITALSDQYHGTAGGRISVWPAPATITTVTVEGMRWAQAFARDRAVMWTLHMAESDHDERIIGWSPAEYMECYGLLDERLQVAHCVYFDRKDVRLLHRHNVKVASQVVSNAYLGSGVAPVPEMVERGMAVGIGTDNNNSCDSVNMIGDMKFMAHIHRAVHRDADVLTPEKILEMATIDGARSLGMDHEIGSIETGKRADLILLDLRHPQTTPHHHLAATIVFQAYGNEVDTVLIDGNVVMENRRLSFLPPERELAFLEEAQSRATAILQRANMVANPAWRSL

SEQ ID NO: 120 - protein, 473 aa, Artificial Sequence
  Description of Artificial Sequence: Synthetic peptide
MQTLSIQHGTLVTMDQYRRVLGDSWVHVQDGRIVALGVHAESVPPPADRVIDARGKVVLPGFINAHTHVNQILLRGGPSHGRQFYDWLFNVLYPGQKAMRPEVAVAVRLYCAEAVRSGITTINEDADSAIYPGNIEAAMAVYGEVGVRVVYARMFFDRMDGRIQGYVDALKARSPQVELCSIMEETAVAKDRITALSDQYHGTAGGRISVWPAPATITTVTVEGMRWAQAFARDRAVMWTLHMAESDHDERIIGWSPAEYMECYGLLDERLQVAHCVYFDRKDVRLLHRHNVKVASQVVSNAYLGSGVAPVPEMVERGMAVGIGTDNNNSSDSVNMIGDMKFMAHIHRAVHRDADVLTPEKILEMATIDGARSLGMDHEIGSIETGKRADLILLDLRHPQTTPHHHLAATIVFQAYGNEVDTVLIDGNVVMENRRLSFLPPERELAFLEEAQSRATAILQRANMVANPAWRSL

SEQ ID NO: 121 - protein, 473 aa, Artificial Sequence
  Description of Artificial Sequence: Synthetic peptide
MQTLSIQHGTLVTMDQYRRVLGDSWVHVQDGRIVALGVHAESVPPPADRVIDARGKVVLPGFINAHTHVNQILLRGGPSHGRQFYDWLFNVLYPGQKAMRPEVAVAVRLYCAEAVRSGITTINEDADSAIYPGNIEAAMAVYGEVGVRVVYARMFFDRMDGRIQGYVDALKARSPQVELCSIMEETAVAKDRITALSDQYHGTAGGRISVWPAPATITTVTVEGMRWAQAFARDRAVMWTLHMAESDHDERILGGSPAEYMECYGLLDERLQVAHCVYFDRKDVRLLHRHNVKVASQVVSNAYLGSGVAPVPEMVERGMAVGIGTDNDNSCDSVNMIGDMKFMAHIHRAVHRDADVLTPEKILEMATIDGARSLGMDHEIGSIETGKRADLILLDLRHPQTTPHHHLAATIVFQAYGNEVDTVLIDGNVVMENRRLSFLPPERELAFLEEAQSRATAILQRANMVANPAWRSL

SEQ ID NO: 122 - protein, 473 aa, Artificial Sequence
  Description of Artificial Sequence: Synthetic peptide
MQTLSIQHGTLVTMDQYRRVLGDSWVHVQDGRIVALGVHAESVPPPADRVIDARGKVVLPGFINAHTHVNQILLRGGPSHGRQFYDWLFNVLYPGQKAMRPEVAVAVRLYCAEAVRSGITTINEDADSAIYPGNIEAAMAVYGEVGVRVVYARMFFDRMDGRIQGYVDALKARSPQVELCSIMEETAVAKDRITALSDQYHGTAGGRISVWPAPATITTVTVEGMRWAQAFARDRAVMWTLHMAESDHDERILGGSPAEYMECYGLLDERLQVAHCVYFDRKDVRLLHRHNVKVASQVVSNAYLGSGVAPVPEMVERGMAVGIGTDNDNSSDSVNMIGDMKFMAHIHRAVHRDADVLTPEKILEMATIDGARSLGMDHEIGSIETGKRADLILLDLRHPQTTPHHHLAATIVFQAYGNEVDTVLIDGNVVMENRRLSFLPPERELAFLEEAQSRATAILQRANMVANPAWRSL

SEQ ID NO: 123 - protein, 473 aa, Artificial Sequence
  Description of Artificial Sequence: Synthetic peptide
MQTLSIQHGTLVTMDQYRRVLGDSWVHVQDGRIVALGVHAESVPPPADRVIDARGKVVLPGFINAHTHVNQILLRGGPSHGRQFYDWLFNVLYPGQKAMRPEVAVAVRLYCAEAVRSGITTINEDADSAIYPGNIEAAMAVYGEVGVRVVYARMFFDRMDGRIQGYVDALKARSPQVELCSIMEETAVAKDRITALSDQYHGTAGGRISVWPAPATITTVTVEGMRWAQAFARDRAVMWTLHMAESDHDERILGGSPAEYMECYGLLDERLQVAHCVYFDRKDVRLLHRHNVKVASQVVSNAYLGSGVAPVPEMVERGMAVGIGTDNNNSCDSVNMIGDMKFMAHIHRAVHRDADVLTPEKILEMATIDGARSLGMDHEIGSIETGKRADLILLDLRHPQTTPHHHLAATIVFQAYGNEVDTVLIDGNVVMENRRLSFLPPERELAFLEEAQSRATAILQRANMVANPAWRSL

SEQ ID NO: 124 - protein, 473 aa, Artificial Sequence
  Description of Artificial Sequence: Synthetic peptide
MQTLSIQHGTLVTMDQYRRVLGDSWVHVQDGRIVALGVHAESVPPPADRVIDARGKVVLPGFINAHTHVNQILLRGGPSHGRQFYDWLFNVLYPGQKAMRPEVAVAVRLYCAEAVRSGITTINEDADSAIYPGNIEAAMAVYGEVGVRVVYARMFFDRMDGRIQGYVDALKARSPQVELCSIMEETAVAKDRITALSDQYHGTAGGRISVWPAPATITTVTVEGMRWAQAFARDRAVMWTLHMAESDHDERILGGSPAEYMECYGLLDERLQVAHCVYFDRKDVRLLHRHNVKVASQVVSNAYLGSGVAPVPEMVERGMAVGIGTDNNNSSDSVNMIGDMKFMAHIHRAVHRDADVLTPEKILEMATIDGARSLGMDHEIGSIETGKRADLILLDLRHPQTTPHHHLAATIVFQAYGNEVDTVLIDGNVVMENRRLSFLPPERELAFLEEAQSRATAILQRANMVANPAWRSL

SEQ ID NO: 125 - protein, 473 aa, Artificial Sequence
  Description of Artificial Sequence: Synthetic peptide
MQTLSIQHGTLVTMDQYRRVLGDSWVHVQDGRIVALGVHAESVPPPADRVIDARGKVVLPGFINAHTHVNQILLRGGPSHGRQFYDWLFNVLYPGQKAMRPEVAVAVRLYCAEAVRSGITTINEDADSAIYPGNIEAAMAVYGEVGVRVVYARMFFDRMDGRIQGYVDALKARSPQVELCSIMEETAVAKDRITALSDQYHGTAGGRISVWPAPATITTVTVEGMRWAQAFARDRAVMWTLHMAESDHDERILGWSPAEYMECYGLLDERLQVAHCVYFDRKDVRLLHRHNVKVASQVVSNAYLGSGVAPVPEMVERGMAVGIGTDNDNSCDSVNMIGDMKFMAHIHRAVHRDADVLTPEKILEMATIDGARSLGMDHEIGSIETGKRADLILLDLRHPQTTPHHHLAATIVFQAYGNEVDTVLIDGNVVMENRRLSFLPPERELAFLEEAQSRATAILQRANMVANPAWRSL

SEQ ID NO: 126 - protein, 473 aa, Artificial Sequence
  Description of Artificial Sequence: Synthetic peptide
MQTLSIQHGTLVTMDQYRRVLGDSWVHVQDGRIVALGVHAESVPPPADRVIDARGKVVLPGFINAHTHVNQILLRGGPSHGRQFYDWLFNVLYPGQKAMRPEVAVAVRLYCAEAVRSGITTINEDADSAIYPGNIEAAMAVYGEVGVRVVYARMFFDRMDGRIQGYVDALKARSPQVELCSIMEETAVAKDRITALSDQYHGTAGGRISVWPAPATITTVTVEGMRWAQAFARDRAVMWTLHMAESDHDERILGWSPAEYMECYGLLDERLQVAHCVYFDRKDVRLLHRHNVKVASQVVSNAYLGSGVAPVPEMVERGMAVGIGTDNDNSSDSVNMIGDMKFMAHIHRAVHRDADVLTPEKILEMATIDGARSLGMDHEIGSIETGKRADLILLDLRHPQTTPHHHLAATIVFQAYGNEVDTVLIDGNVVMENRRLSFLPPERELAFLEEAQSRATAILQRANMVANPAWRSL

SEQ ID NO: 127 - protein, 473 aa, Artificial Sequence
  Description of Artificial Sequence: Synthetic peptide
MQTLSIQHGTLVTMDQYRRVLGDSWVHVQDGRIVALGVHAESVPPPADRVIDARGKVVLPGFINAHTHVNQILLRGGPSHGRQFYDWLFNVLYPGQKAMRPEVAVAVRLYCAEAVRSGITTINEDADSAIYPGNIEAAMAVYGEVGVRVVYARMFFDRMDGRIQGYVDALKARSPQVELCSIMEETAVAKDRITALSDQYHGTAGGRISVWPAPATITTVTVEGMRWAQAFARDRAVMWTLHMAESDHDERILGWSPAEYMECYGLLDERLQVAHCVYFDRKDVRLLHRHNVKVASQVVSNAYLGSGVAPVPEMVERGMAVGIGTDNNNSCDSVNMIGDMKFMAHIHRAVHRDADVLTPEKILEMATIDGARSLGMDHEIGSIETGKRADLILLDLRHPQTTPHHHLAATIVFQAYGNEVDTVLIDGNVVMENRRLSFLPPERELAFLEEAQSRATAILQRANMVANPAWRSL

SEQ ID NO: 128 - protein, 473 aa, Artificial Sequence
  Description of Artificial Sequence: Synthetic peptide
MQTLSIQHGTLVTMDQYRRVLGDSWVHVQDGRIVALGVHAESVPPPADRVIDARGKVVLPGFINAHTHVNQILLRGGPSHGRQFYDWLFNVLYPGQKAMRPEVAVAVRLYCAEAVRSGITTINEDADSAIYPGNIEAAMAVYGEVGVRVVYARMFFDRMDGRIQGYVDALKARSPQVELCSIMEETAVAKDRITALSDQYHGTAGGRISVWPAPATITTVTVEGMRWAQAFARDRAVMWTLHMAESDHDERILGWSPAEYMECYGLLDERLQVAHCVYFDRKDVRLLHRHNVKVASQVVSNAYLGSGVAPVPEMVERGMAVGIGTDNNNSSDSVNMIGDMKFMAHIHRAVHRDADVLTPEKILEMATIDGARSLGMDHEIGSIETGKRADLILLDLRHPQTTPHHHLAATIVFQAYGNEVDTVLIDGNVVMENRRLSFLPPERELAFLEEAQSRATAILQRANMVANPAWRSL

SEQ ID NO: 129 - protein, 473 aa, Artificial Sequence
  Description of Artificial Sequence: Synthetic peptide
MQTLSIQHGTLVTMDQYRRVLGDSWVHVQDGRIVALGVHAESVPPPADRVIDARGKVVLPGFINAHTHVNQILLRGGPSHGRQFYDWLFNVLYPGQKAMRPEVAVAVRLYCAEAVRSGITTINEDADSAIYPGNIEAAMAVYGEVGVRVVYARMFFDRMDGRIQGYVDALKARSPQVELCSIMEETAVAKDRITALSDQYHGTAGGRISVWPAPATTTPVTVEGMRWAQAFARDRAVMWTLHMAESDHDERIIGGSPAEYMECYGLLDERLQVAHCVYFDRKDVRLLHRHNVKVASQVVSNAYLGSGVAPVPEMVERGMAVGIGTDNDNSCDSVNMIGDMKFMAHIHRAVHRDADVLTPEKILEMATIDGARSLGMDHEIGSIETGKRADLILLDLRHPQTTPHHHLAATIVFQAYGNEVDTVLIDGNVVMENRRLSFLPPERELAFLEEAQSRATAILQRANMVANPAWRSL

SEQ ID NO: 130 - protein, 473 aa, Artificial Sequence
  Description of Artificial Sequence: Synthetic peptide
MQTLSIQHGTLVTMDQYRRVLGDSWVHVQDGRIVALGVHAESVPPPADRVIDARGKVVLPGFINAHTHVNQILLRGGPSHGRQFYDWLFNVLYPGQKAMRPEVAVAVRLYCAEAVRSGITTINEDADSAIYPGNIEAAMAVYGEVGVRVVYARMFFDRMDGRIQGYVDALKARSPQVELCSIMEETAVAKDRITALSDQYHGTAGGRISVWPAPATTTPVTVEGMRWAQAFARDRAVMWTLHMAESDHDERIIGGSPAEYMECYGLLDERLQVAHCVYFDRKDVRLLHRHNVKVASQVVSNAYLGSGVAPVPEMVERGMAVGIGTDNDNSSDSVNMIGDMKFMAHIHRAVHRDADVLTPEKILEMATIDGARSLGMDHEIGSIETGKRADLILLDLRHPQTTPHHHLAATIVFQAYGNEVDTVLIDGNVVMENRRLSFLPPERELAFLEEAQSRATAILQRANMVANPAWRSL

SEQ ID NO: 131 - protein, 473 aa, Artificial Sequence
  Description of Artificial Sequence: Synthetic peptide
MQTLSIQHGTLVTMDQYRRVLGDSWVHVQDGRIVALGVHAESVPPPADRVIDARGKVVLPGFINAHTHVNQILLRGGPSHGRQFYDWLFNVLYPGQKAMRPEVAVAVRLYCAEAVRSGITTINEDADSAIYPGNIEAAMAVYGEVGVRVVYARMFFDRMDGRIQGYVDALKARSPQVELCSIMEETAVAKDRITALSDQYHGTAGGRISVWPAPATTTPVTVEGMRWAQAFARDRAVMWTLHMAESDHDERIIGGSPAEYMECYGLLDERLQVAHCVYFDRKDVRLLHRHNVKVASQVVSNAYLGSGVAPVPEMVERGMAVGIGTDNNNSCDSVNMIGDMKFMAHIHRAVHRDADVLTPEKILEMATIDGARSLGMDHEIGSIETGKRADLILLDLRHPQTTPHHHLAATIVFQAYGNEVDTVLIDGNVVMENRRLSFLPPERELAFLEEAQSRATAILQRANMVANPAWRSL

SEQ ID NO: 132 - protein, 473 aa, Artificial Sequence
  Description of Artificial Sequence: Synthetic peptide
MQTLSIQHGTLVTMDQYRRVLGDSWVHVQDGRIVALGVHAESVPPPADRVIDARGKVVLPGFINAHTHVNQILLRGGPSHGRQFYDWLFNVLYPGQKAMRPEVAVAVRLYCAEAVRSGITTINEDADSAIYPGNIEAAMAVYGEVGVRVVYARMFFDRMDGRIQGYVDALKARSPQVELCSIMEETAVAKDRITALSDQYHGTAGGRISVWPAPATTTPVTVEGMRWAQAFARDRAVMWTLHMAESDHDERIIGGSPAEYMECYGLLDERLQVAHCVYFDRKDVRLLHRHNVKVASQVVSNAYLGSGVAPVPEMVERGMAVGIGTDNNNSSDSVNMIGDMKFMAHIHRAVHRDADVLTPEKILEMATIDGARSLGMDHEIGSIETGKRADLILLDLRHPQTTPHHHLAATIVFQAYGNEVDTVLIDGNVVMENRRLSFLPPERELAFLEEAQSRATAILQRANMVANPAWRSL

SEQ ID NO: 133 - protein, 473 aa, Artificial Sequence
  Description of Artificial Sequence: Synthetic peptide
MQTLSIQHGTLVTMDQYRRVLGDSWVHVQDGRIVALGVHAESVPPPADRVIDARGKVVLPGFINAHTHVNQILLRGGPSHGRQFYDWLFNVLYPGQKAMRPEVAVAVRLYCAEAVRSGITTINEDADSAIYPGNIEAAMAVYGEVGVRVVYARMFFDRMDGRIQGYVDALKARSPQVELCSIMEETAVAKDRITALSDQYHGTAGGRISVWPAPATTTPVTVEGMRWAQAFARDRAVMWTLHMAESDHDERIIGWSPAEYMECYGLLDERLQVAHCVYFDRKDVRLLHRHNVKVASQVVSNAYLGSGVAPVPEMVERGMAVGIGTDNDNSCDSVNMIGDMKFMAHIHRAVHRDADVLTPEKILEMATIDGARSLGMDHEIGSIETGKRADLILLDLRHPQTTPHHHLAATIVFQAYGNEVDTVLIDGNVVMENRRLSFLPPERELAFLEEAQSRATAILQRANMVANPAWRSL

SEQ ID NO: 134 - protein, 473 aa, Artificial Sequence
  Description of Artificial Sequence: Synthetic peptide
MQTLSIQHGTLVTMDQYRRVLGDSWVHVQDGRIVALGVHAESVPPPADRVIDARGKVVLPGFINAHTHVNQILLRGGPSHGRQFYDWLFNVLYPGQKAMRPEVAVAVRLYCAEAVRSGITTINEDADSAIYPGNIEAAMAVYGEVGVRVVYARMFFDRMDGRIQGYVDALKARSPQVELCSIMEETAVAKDRITALSDQYHGTAGGRISVWPAPATTTPVTVEGMRWAQAFARDRAVMWTLHMAESDHDERIIGWSPAEYMECYGLLDERLQVAHCVYFDRKDVRLLHRHNVKVASQVVSNAYLGSGVAPVPEMVERGMAVGIGTDNDNSSDSVNMIGDMKFMAHIHRAVHRDADVLTPEKILEMATIDGARSLGMDHEIGSIETGKRADLILLDLRHPQTTPHHHLAATIVFQAYGNEVDTVLIDGNVVMENRRLSFLPPERELAFLEEAQSRATAILQRANMVANPAWRSL

SEQ ID NO: 135 - protein, 473 aa, Artificial Sequence
  Description of Artificial Sequence: Synthetic peptide
MQTLSIQHGTLVTMDQYRRVLGDSWVHVQDGRIVALGVHAESVPPPADRVIDARGKVVLPGFINAHTHVNQILLRGGPSHGRQFYDWLFNVLYPGQKAMRPEVAVAVRLYCAEAVRSGITTINEDADSAIYPGNIEAAMAVYGEVGVRVVYARMFFDRMDGRIQGYVDALKARSPQVELCSIMEETAVAKDRITALSDQYHGTAGGRISVWPAPATTTPVTVEGMRWAQAFARDRAVMWTLHMAESDHDERIIGWSPAEYMECYGLLDERLQVAHCVYFDRKDVRLLHRHNVKVASQVVSNAYLGSGVAPVPEMVERGMAVGIGTDNNNSCDSVNMIGDMKFMAHIHRAVHRDADVLTPEKILEMATIDGARSLGMDHEIGSIETGKRADLILLDLRHPQTTPHHHLAATIVFQAYGNEVDTVLIDGNVVMENRRLSFLPPERELAFLEEAQSRATAILQRANMVANPAWRSL

SEQ ID NO: 136 - protein, 473 aa, Artificial Sequence
  Description of Artificial Sequence: Synthetic peptide
MQTLSIQHGTLVTMDQYRRVLGDSWVHVQDGRIVALGVHAESVPPPADRVIDARGKVVLPGFINAHTHVNQILLRGGPSHGRQFYDWLFNVLYPGQKAMRPEVAVAVRLYCAEAVRSGITTINEDADSAIYPGNIEAAMAVYGEVGVRVVYARMFFDRMDGRIQGYVDALKARSPQVELCSIMEETAVAKDRITALSDQYHGTAGGRISVWPAPATTTPVTVEGMRWAQAFARDRAVMWTLHMAESDHDERIIGWSPAEYMECYGLLDERLQVAHCVYFDRKDVRLLHRHNVKVASQVVSNAYLGSGVAPVPEMVERGMAVGIGTDNNNSSDSVNMIGDMKFMAHIHRAVHRDADVLTPEKILEMATIDGARSLGMDHEIGSIETGKRADLILLDLRHPQTTPHHHLAATIVFQAYGNEVDTVLIDGNVVMENRRLSFLPPERELAFLEEAQSRATAILQRANMVANPAWRSL

SEQ ID NO: 137 - protein, 473 aa, Artificial Sequence
  Description of Artificial Sequence: Synthetic peptide
MQTLSIQHGTLVTMDQYRRVLGDSWVHVQDGRIVALGVHAESVPPPADRVIDARGKVVLPGFINAHTHVNQILLRGGPSHGRQFYDWLFNVLYPGQKAMRPEVAVAVRLYCAEAVRSGITTINEDADSAIYPGNIEAAMAVYGEVGVRVVYARMFFDRMDGRIQGYVDALKARSPQVELCSIMEETAVAKDRITALSDQYHGTAGGRISVWPAPATTTPVTVEGMRWAQAFARDRAVMWTLHMAESDHDERILGGSPAEYMECYGLLDERLQVAHCVYFDRKDVRLLHRHNVKVASQVVSNAYLGSGVAPVPEMVERGMAVGIGTDNDNSCDSVNMIGDMKFMAHIHRAVHRDADVLTPEKILEMATIDGARSLGMDHEIGSIETGKRADLILLDLRHPQTTPHHHLAATIVFQAYGNEVDTVLIDGNVVMENRRLSFLPPERELAFLEEAQSRATAILQRANMVANPAWRSL

SEQ ID NO: 138 - protein, 473 aa, Artificial Sequence
  Description of Artificial Sequence: Synthetic peptide
MQTLSIQHGTLVTMDQYRRVLGDSWVHVQDGRIVALGVHAESVPPPADRVIDARGKVVLPGFINAHTHVNQILLRGGPSHGRQFYDWLFNVLYPGQKAMRPEVAVAVRLYCAEAVRSGITTINEDADSAIYPGNIEAAMAVYGEVGVRVVYARMFFDRMDGRIQGYVDALKARSPQVELCSIMEETAVAKDRITALSDQYHGTAGGRISVWPAPATTTPVTVEGMRWAQAFARDRAVMWTLHMAESDHDERILGGSPAEYMECYGLLDERLQVAHCVYFDRKDVRLLHRHNVKVASQVVSNAYLGSGVAPVPEMVERGMAVGIGTDNDNSSDSVNMIGDMKFMAHIHRAVHRDADVLTPEKILEMATIDGARSLGMDHEIGSIETGKRADLILLDLRHPQTTPHHHLAATIVFQAYGNEVDTVLIDGNVVMENRRLSFLPPERELAFLEEAQSRATAILQRANMVANPAWRSL

SEQ ID NO: 139 - protein, 473 aa, Artificial Sequence
  Description of Artificial Sequence: Synthetic peptide
MQTLSIQHGTLVTMDQYRRVLGDSWVHVQDGRIVALGVHAESVPPPADRVIDARGKVVLPGFINAHTHVNQILLRGGPSHGRQFYDWLFNVLYPGQKAMRPEVAVAVRLYCAEAVRSGITTINEDADSAIYPGNIEAAMAVYGEVGVRVVYARMFFDRMDGRIQGYVDALKARSPQVELCSIMEETAVAKDRITALSDQYHGTAGGRISVWPAPATTTPVTVEGMRWAQAFARDRAVMWTLHMAESDHDERILGGSPAEYMECYGLLDERLQVAHCVYFDRKDVRLLHRHNVKVASQVVSNAYLGSGVAPVPEMVERGMAVGIGTDNNNSCDSVNMIGDMKFMAHIHRAVHRDADVLTPEKILEMATIDGARSLGMDHEIGSIETGKRADLILLDLRHPQTTPHHHLAATIVFQAYGNEVDTVLIDGNVVMENRRLSFLPPERELAFLEEAQSRATAILQRANMVANPAWRSL

SEQ ID NO: 140 - protein, 473 aa, Artificial Sequence
  Description of Artificial Sequence: Synthetic peptide
MQTLSIQHGTLVTMDQYRRVLGDSWVHVQDGRIVALGVHAESVPPPADRVIDARGKVVLPGFINAHTHVNQILLRGGPSHGRQFYDWLFNVLYPGQKAMRPEVAVAVRLYCAEAVRSGITTINEDADSAIYPGNIEAAMAVYGEVGVRVVYARMFFDRMDGRIQGYVDALKARSPQVELCSIMEETAVAKDRITALSDQYHGTAGGRISVWPAPATTTPVTVEGMRWAQAFARDRAVMWTLHMAESDHDERILGGSPAEYMECYGLLDERLQVAHCVYFDRKDVRLLHRHNVKVASQVVSNAYLGSGVAPVPEMVERGMAVGIGTDNNNSSDSVNMIGDMKFMAHIHRAVHRDADVLTPEKILEMATIDGARSLGMDHEIGSIETGKRADLILLDLRHPQTTPHHHLAATIVFQAYGNEVDTVLIDGNVVMENRRLSFLPPERELAFLEEAQSRATAILQRANMVANPAWRSL

SEQ ID NO: 141 - protein, 473 aa, Artificial Sequence
  Description of Artificial Sequence: Synthetic peptide
MQTLSIQHGTLVTMDQYRRVLGDSWVHVQDGRIVALGVHAESVPPPADRVIDARGKVVLPGFINAHTHVNQILLRGGPSHGRQFYDWLFNVLYPGQKAMRPEVAVAVRLYCAEAVRSGITTINEDADSAIYPGNIEAAMAVYGEVGVRVVYARMFFDRMDGRIQGYVDALKARSPQVELCSIMEETAVAKDRITALSDQYHGTAGGRISVWPAPATTTPVTVEGMRWAQAFARDRAVMWTLHMAESDHDERILGWSPAEYMECYGLLDERLQVAHCVYFDRKDVRLLHRHNVKVASQVVSNAYLGSGVAPVPEMVERGMAVGIGTDNDNSCDSVNMIGDMKFMAHIHRAVHRDADVLTPEKILEMATIDGARSLGMDHEIGSIETGKRADLILLDLRHPQTTPHHHLAATIVFQAYGNEVDTVLIDGNVVMENRRLSFLPPERELAFLEEAQSRATAILQRANMVANPAWRSL

SEQ ID NO: 142 - protein, 473 aa, Artificial Sequence
  Description of Artificial Sequence: Synthetic peptide
MQTLSIQHGTLVTMDQYRRVLGDSWVHVQDGRIVALGVHAESVPPPADRVIDARGKVVLPGFINAHTHVNQILLRGGPSHGRQFYDWLFNVLYPGQKAMRPEVAVAVRLYCAEAVRSGITTINEDADSAIYPGNIEAAMAVYGEVGVRVVYARMFFDRMDGRIQGYVDALKARSPQVELCSIMEETAVAKDRITALSDQYHGTAGGRISVWPAPATTTPVTVEGMRWAQAFARDRAVMWTLHMAESDHDERILGWSPAEYMECYGLLDERLQVAHCVYFDRKDVRLLHRHNVKVASQVVSNAYLGSGVAPVPEMVERGMAVGIGTDNDNSSDSVNMIGDMKFMAHIHRAVHRDADVLTPEKILEMATIDGARSLGMDHEIGSIETGKRADLILLDLRHPQTTPHHHLAATIVFQAYGNEVDTVLIDGNVVMENRRLSFLPPERELAFLEEAQSRATAILQRANMVANPAWRSL

SEQ ID NO: 143 - protein, 473 aa, Artificial Sequence
  Description of Artificial Sequence: Synthetic peptide
MQTLSIQHGTLVTMDQYRRVLGDSWVHVQDGRIVALGVHAESVPPPADRVIDARGKVVLPGFINAHTHVNQILLRGGPSHGRQFYDWLFNVLYPGQKAMRPEVAVAVRLYCAEAVRSGITTINEDADSAIYPGNIEAAMAVYGEVGVRVVYARMFFDRMDGRIQGYVDALKARSPQVELCSIMEETAVAKDRITALSDQYHGTAGGRISVWPAPATTTPVTVEGMRWAQAFARDRAVMWTLHMAESDHDERILGWSPAEYMECYGLLDERLQVAHCVYFDRKDVRLLHRHNVKVASQVVSNAYLGSGVAPVPEMVERGMAVGIGTDNNNSCDSVNMIGDMKFMAHIHRAVHRDADVLTPEKILEMATIDGARSLGMDHEIGSIETGKRADLILLDLRHPQTTPHHHLAATIVFQAYGNEVDTVLIDGNVVMENRRLSFLPPERELAFLEEAQSRATAILQRANMVANPAWRSL

SEQ ID NO: 144 - protein, 473 aa, Artificial Sequence
  Description of Artificial Sequence: Synthetic peptide
MQTLSIQHGTLVTMDQYRRVLGDSWVHVQDGRIVALGVHAESVPPPADRVIDARGKVVLPGFINAHTHVNQILLRGGPSHGRQFYDWLFNVLYPGQKAMRPEVAVAVRLYCAEAVRSGITTINEDADSAIYPGNIEAAMAVYGEVGVRVVYARMFFDRMDGRIQGYVDALKARSPQVELCSIMEETAVAKDRITALSDQYHGTAGGRISVWPAPATTTPVTVEGMRWAQAFARDRAVMWTLHMAESDHDERILGWSPAEYMECYGLLDERLQVAHCVYFDRKDVRLLHRHNVKVASQVVSNAYLGSGVAPVPEMVERGMAVGIGTDNNNSSDSVNMIGDMKFMAHIHRAVHRDADVLTPEKILEMATIDGARSLGMDHEIGSIETGKRADLILLDLRHPQTTPHHHLAATIVFQAYGNEVDTVLIDGNVVMENRRLSFLPPERELAFLEEAQSRATAILQRANMVANPAWRSL

SEQ ID NO: 145 - protein, 473 aa, Artificial Sequence
  Description of Artificial Sequence: Synthetic peptide
MQTLSIQHGTLVTMDQYRRVLGDSWVHVQDGRIVALGVHAESVPPPADRVIDARGKVVLPGFINAHTHVNQILLRGGPSHGRQFYDWLFNVLYPGQKAMRPEVAVAVRLYCAEAVRSGITTINEDADSAIYPGNIEAAMAVYGEVGVRVVYARMFFDRMDGRIQGYVDALKARSPQVELCSIMEETAVAKDRITALSDQYHGTAGGRISVWPAPATTTTVTVEGMRWAQAFARDRAVMWTLHMAESDHDERIIGGSPAEYMECYGLLDERLQVAHCVYFDRKDVRLLHRHNVKVASQVVSNAYLGSGVAPVPEMVERGMAVGIGTDNDNSCDSVNMIGDMKFMAHIHRAVHRDADVLTPEKILEMATIDGARSLGMDHEIGSIETGKRADLILLDLRHPQTTPHHHLAATIVFQAYGNEVDTVLIDGNVVMENRRLSFLPPERELAFLEEAQSRATAILQRANMVANPAWRSL

SEQ ID NO: 146 - protein, 473 aa, Artificial Sequence
  Description of Artificial Sequence: Synthetic peptide
MQTLSIQHGTLVTMDQYRRVLGDSWVHVQDGRIVALGVHAESVPPPADRVIDARGKVVLPGFINAHTHVNQILLRGGPSHGRQFYDWLFNVLYPGQKAMRPEVAVAVRLYCAEAVRSGITTINEDADSAIYPGNIEAAMAVYGEVGVRVVYARMFFDRMDGRIQGYVDALKARSPQVELCSIMEETAVAKDRITALSDQYHGTAGGRISVWPAPATTTTVTVEGMRWAQAFARDRAVMWTLHMAESDHDERIIGGSPAEYMECYGLLDERLQVAHCVYFDRKDVRLLHRHNVKVASQVVSNAYLGSGVAPVPEMVERGMAVGIGTDNDNSSDSVNMIGDMKFMAHIHRAVHRDADVLTPEKILEMATIDGARSLGMDHEIGSIETGKRADLILLDLRHPQTTPHHHLAATIVFQAYGNEVDTVLIDGNVVMENRRLSFLPPERELAFLEEAQSRATAILQRANMVANPAWRSL

SEQ ID NO: 147 - protein, 473 aa, Artificial Sequence
  Description of Artificial Sequence: Synthetic peptide
MQTLSIQHGTLVTMDQYRRVLGDSWVHVQDGRIVALGVHAESVPPPADRVIDARGKVVLPGFINAHTHVNQILLRGGPSHGRQFYDWLFNVLYPGQKAMRPEVAVAVRLYCAEAVRSGITTINEDADSAIYPGNIEAAMAVYGEVGVRVVYARMFFDRMDGRIQGYVDALKARSPQVELCSIMEETAVAKDRITALSDQYHGTAGGRISVWPAPATTTTVTVEGMRWAQAFARDRAVMWTLHMAESDHDERIIGGSPAEYMECYGLLDERLQVAHCVYFDRKDVRLLHRHNVKVASQVVSNAYLGSGVAPVPEMVERGMAVGIGTDNNNSCDSVNMIGDMKFMAHIHRAVHRDADVLTPEKILEMATIDGARSLGMDHEIGSIETGKRADLILLDLRHPQTTPHHHLAATIVFQAYGNEVDTVLIDGNVVMENRRLSFLPPERELAFLEEAQSRATAILQRANMVANPAWRSL

SEQ ID NO: 148 - protein, 473 aa, Artificial Sequence
  Description of Artificial Sequence: Synthetic peptide
MQTLSIQHGTLVTMDQYRRVLGDSWVHVQDGRIVALGVHAESVPPPADRVIDARGKVVLPGFINAHTHVNQILLRGGPSHGRQFYDWLFNVLYPGQKAMRPEVAVAVRLYCAEAVRSGITTINEDADSAIYPGNIEAAMAVYGEVGVRVVYARMFFDRMDGRIQGYVDALKARSPQVELCSIMEETAVAKDRITALSDQYHGTAGGRISVWPAPATTTTVTVEGMRWAQAFARDRAVMWTLHMAESDHDERIIGGSPAEYMECYGLLDERLQVAHCVYFDRKDVRLLHRHNVKVASQVVSNAYLGSGVAPVPEMVERGMAVGIGTDNNNSSDSVNMIGDMKFMAHIHRAVHRDADVLTPEKILEMATIDGARSLGMDHEIGSIETGKRADLILLDLRHPQTTPHHHLAATIVFQAYGNEVDTVLIDGNVVMENRRLSFLPPERELAFLEEAQSRATAILQRANMVANPAWRSL

SEQ ID NO: 149 - protein, 473 aa, Artificial Sequence
  Description of Artificial Sequence: Synthetic peptide
MQTLSIQHGTLVTMDQYRRVLGDSWVHVQDGRIVALGVHAESVPPPADRVIDARGKVVLPGFINAHTHVNQILLRGGPSHGRQFYDWLFNVLYPGQKAMRPEVAVAVRLYCAEAVRSGITTINEDADSAIYPGNIEAAMAVYGEVGVRVVYARMFFDRMDGRIQGYVDALKARSPQVELCSIMEETAVAKDRITALSDQYHGTAGGRISVWPAPATTTTVTVEGMRWAQAFARDRAVMWTLHMAESDHDERIIGWSPAEYMECYGLLDERLQVAHCVYFDRKDVRLLHRHNVKVASQVVSNAYLGSGVAPVPEMVERGMAVGIGTDNDNSCDSVNMIGDMKFMAHIHRAVHRDADVLTPEKILEMATIDGARSLGMDHEIGSIETGKRADLILLDLRHPQTTPHHHLAATIVFQAYGNEVDTVLIDGNVVMENRRLSFLPPERELAFLEEAQSRATAILQRANMVANPAWRSL

SEQ ID NO: 150 - protein, 473 aa, Artificial Sequence
  Description of Artificial Sequence: Synthetic peptide
MQTLSIQHGTLVTMDQYRRVLGDSWVHVQDGRIVALGVHAESVPPPADRVIDARGKVVLPGFINAHTHVNQILLRGGPSHGRQFYDWLFNVLYPGQKAMRPEVAVAVRLYCAEAVRSGITTINEDADSAIYPGNIEAAMAVYGEVGVRVVYARMFFDRMDGRIQGYVDALKARSPQVELCSIMEETAVAKDRITALSDQYHGTAGGRISVWPAPATTTTVTVEGMRWAQAFARDRAVMWTLHMAESDHDERIIGWSPAEYMECYGLLDERLQVAHCVYFDRKDVRLLHRHNVKVASQVVSNAYLGSGVAPVPEMVERGMAVGIGTDNDNSSDSVNMIGDMKFMAHIHRAVHRDADVLTPEKILEMATIDGARSLGMDHEIGSIETGKRADLILLDLRHPQTTPHHHLAATIVFQAYGNEVDTVLIDGNVVMENRRLSFLPPERELAFLEEAQSRATAILQRANMVANPAWRSL

SEQ ID NO: 151 - protein, 473 aa, Artificial Sequence
  Description of Artificial Sequence: Synthetic peptide
MQTLSIQHGTLVTMDQYRRVLGDSWVHVQDGRIVALGVHAESVPPPADRVIDARGKVVLPGFINAHTHVNQILLRGGPSHGRQFYDWLFNVLYPGQKAMRPEVAVAVRLYCAEAVRSGITTINEDADSAIYPGNIEAAMAVYGEVGVRVVYARMFFDRMDGRIQGYVDALKARSPQVELCSIMEETAVAKDRITALSDQYHGTAGGRISVWPAPATTTTVTVEGMRWAQAFARDRAVMWTLHMAESDHDERIIGWSPAEYMECYGLLDERLQVAHCVYFDRKDVRLLHRHNVKVASQVVSNAYLGSGVAPVPEMVERGMAVGIGTDNNNSCDSVNMIGDMKFMAHIHRAVHRDADVLTPEKILEMATIDGARSLGMDHEIGSIETGKRADLILLDLRHPQTTPHHHLAATIVFQAYGNEVDTVLIDGNVVMENRRLSFLPPERELAFLEEAQSRATAILQRANMVANPAWRSL

SEQ ID NO: 152 - protein, 473 aa, Artificial Sequence
  Description of Artificial Sequence: Synthetic peptide
MQTLSIQHGTLVTMDQYRRVLGDSWVHVQDGRIVALGVHAESVPPPADRVIDARGKVVLPGFINAHTHVNQILLRGGPSHGRQFYDWLFNVLYPGQKAMRPEVAVAVRLYCAEAVRSGITTINEDADSAIYPGNIEAAMAVYGEVGVRVVYARMFFDRMDGRIQGYVDALKARSPQVELCSIMEETAVAKDRITALSDQYHGTAGGRISVWPAPATTTTVTVEGMRWAQAFARDRAVMWTLHMAESDHDERIIGWSPAEYMECYGLLDERLQVAHCVYFDRKDVRLLHRHNVKVASQVVSNAYLGSGVAPVPEMVERGMAVGIGTDNNNSSDSVNMIGDMKFMAHIHRAVHRDADVLTPEKILEMATIDGARSLGMDHEIGSIETGKRADLILLDLRHPQTTPHHHLAATIVFQAYGNEVDTVLIDGNVVMENRRLSFLPPERELAFLEEAQSRATAILQRANMVANPAWRSL

SEQ ID NO: 153 - protein, 473 aa, Artificial Sequence
  Description of Artificial Sequence: Synthetic peptide
MQTLSIQHGTLVTMDQYRRVLGDSWVHVQDGRIVALGVHAESVPPPADRVIDARGKVVLPGFINAHTHVNQILLRGGPSHGRQFYDWLFNVLYPGQKAMRPEVAVAVRLYCAEAVRSGITTINEDADSAIYPGNIEAAMAVYGEVGVRVVYARMFFDRMDGRIQGYVDALKARSPQVELCSIMEETAVAKDRITALSDQYHGTAGGRISVWPAPATTTTVTVEGMRWAQAFARDRAVMWTLHMAESDHDERILGGSPAEYMECYGLLDERLQVAHCVYFDRKDVRLLHRHNVKVASQVVSNAYLGSGVAPVPEMVERGMAVGIGTDNDNSCDSVNMIGDMKFMAHIHRAVHRDADVLTPEKILEMATIDGARSLGMDHEIGSIETGKRADLILLDLRHPQTTPHHHLAATIVFQAYGNEVDTVLIDGNVVMENRRLSFLPPERELAFLEEAQSRATAILQRANMVANPAWRSL

SEQ ID NO: 154 - protein, 473 aa, Artificial Sequence
  Description of Artificial Sequence: Synthetic peptide
MQTLSIQHGTLVTMDQYRRVLGDSWVHVQDGRIVALGVHAESVPPPADRVIDARGKVVLPGFINAHTHVNQILLRGGPSHGRQFYDWLFNVLYPGQKAMRPEVAVAVRLYCAEAVRSGITTINEDADSAIYPGNIEAAMAVYGEVGVRVVYARMFFDRMDGRIQGYVDALKARSPQVELCSIMEETAVAKDRITALSDQYHGTAGGRISVWPAPATTTTVTVEGMRWAQAFARDRAVMWTLHMAESDHDERILGGSPAEYMECYGLLDERLQVAHCVYFDRKDVRLLHRHNVKVASQVVSNAYLGSGVAPVPEMVERGMAVGIGTDNDNSSDSVNMIGDMKFMAHIHRAVHRDADVLTPEKILEMATIDGARSLGMDHEIGSIETGKRADLILLDLRHPQTTPHHHLAATIVFQAYGNEVDTVLIDGNVVMENRRLSFLPPERELAFLEEAQSRATAILQRANMVANPAWRSL

SEQ ID NO: 155 - protein, 473 aa, Artificial Sequence
  Description of Artificial Sequence: Synthetic peptide
MQTLSIQHGTLVTMDQYRRVLGDSWVHVQDGRIVALGVHAESVPPPADRVIDARGKVVLPGFINAHTHVNQILLRGGPSHGRQFYDWLFNVLYPGQKAMRPEVAVAVRLYCAEAVRSGITTINEDADSAIYPGNIEAAMAVYGEVGVRVVYARMFFDRMDGRIQGYVDALKARSPQVELCSIMEETAVAKDRITALSDQYHGTAGGRISVWPAPATTTTVTVEGMRWAQAFARDRAVMWTLHMAESDHDERILGGSPAEYMECYGLLDERLQVAHCVYFDRKDVRLLHRHNVKVASQVVSNAYLGSGVAPVPEMVERGMAVGIGTDNNNSCDSVNMIGDMKFMAHIHRAVHRDADVLTPEKILEMATIDGARSLGMDHEIGSIETGKRADLILLDLRHPQTTPHHHLAATIVFQAYGNEVDTVLIDGNVVMENRRLSFLPPERELAFLEEAQSRATAILQRANMVANPAWRSL

SEQ ID NO: 156 - protein, 473 aa, Artificial Sequence
  Description of Artificial Sequence: Synthetic peptide
MQTLSIQHGTLVTMDQYRRVLGDSWVHVQDGRIVALGVHAESVPPPADRVIDARGKVVLPGFINAHTHVNQILLRGGPSHGRQFYDWLFNVLYPGQKAMRPEVAVAVRLYCAEAVRSGITTINEDADSAIYPGNIEAAMAVYGEVGVRVVYARMFFDRMDGRIQGYVDALKARSPQVELCSIMEETAVAKDRITALSDQYHGTAGGRISVWPAPATTTTVTVEGMRWAQAFARDRAVMWTLHMAESDHDERILGGSPAEYMECYGLLDERLQVAHCVYFDRKDVRLLHRHNVKVASQVVSNAYLGSGVAPVPEMVERGMAVGIGTDNNNSSDSVNMIGDMKFMAHIHRAVHRDADVLTPEKILEMATIDGARSLGMDHEIGSIETGKRADLILLDLRHPQTTPHHHLAATIVFQAYGNEVDTVLIDGNVVMENRRLSFLPPERELAFLEEAQSRATAILQRANMVANPAWRSL

SEQ ID NO: 157 - protein, 473 aa, Artificial Sequence
  Description of Artificial Sequence: Synthetic peptide
MQTLSIQHGTLVTMDQYRRVLGDSWVHVQDGRIVALGVHAESVPPPADRVIDARGKVVLPGFINAHTHVNQILLRGGPSHGRQFYDWLFNVLYPGQKAMRPEVAVAVRLYCAEAVRSGITTINEDADSAIYPGNIEAAMAVYGEVGVRVVYARMFFDRMDGRIQGYVDALKARSPQVELCSIMEETAVAKDRITALSDQYHGTAGGRISVWPAPATTTTVTVEGMRWAQAFARDRAVMWTLHMAESDHDERILGWSPAEYMECYGLLDERLQVAHCVYFDRKDVRLLHRHNVKVASQVVSNAYLGSGVAPVPEMVERGMAVGIGTDNDNSCDSVNMIGDMKFMAHIHRAVHRDADVLTPEKILEMATIDGARSLGMDHEIGSIETGKRADLILLDLRHPQTTPHHHLAATIVFQAYGNEVDTVLIDGNVVMENRRLSFLPPERELAFLEEAQSRATAILQRANMVANPAWRSL

SEQ ID NO: 158 - protein, 473 aa, Artificial Sequence
  Description of Artificial Sequence: Synthetic peptide
MQTLSIQHGTLVTMDQYRRVLGDSWVHVQDGRIVALGVHAESVPPPADRVIDARGKVVLPGFINAHTHVNQILLRGGPSHGRQFYDWLFNVLYPGQKAMRPEVAVAVRLYCAEAVRSGITTINEDADSAIYPGNIEAAMAVYGEVGVRVVYARMFFDRMDGRIQGYVDALKARSPQVELCSIMEETAVAKDRITALSDQYHGTAGGRISVWPAPATTTTVTVEGMRWAQAFARDRAVMWTLHMAESDHDERILGWSPAEYMECYGLLDERLQVAHCVYFDRKDVRLLHRHNVKVASQVVSNAYLGSGVAPVPEMVERGMAVGIGTDNDNSSDSVNMIGDMKFMAHIHRAVHRDADVLTPEKILEMATIDGARSLGMDHEIGSIETGKRADLILLDLRHPQTTPHHHLAATIVFQAYGNEVDTVLIDGNVVMENRRLSFLPPERELAFLEEAQSRATAILQRANMVANPAWRSL

SEQ ID NO: 159 - protein, 473 aa, Artificial Sequence
  Description of Artificial Sequence: Synthetic peptide
MQTLSIQHGTLVTMDQYRRVLGDSWVHVQDGRIVALGVHAESVPPPADRVIDARGKVVLPGFINAHTHVNQILLRGGPSHGRQFYDWLFNVLYPGQKAMRPEVAVAVRLYCAEAVRSGITTINEDADSAIYPGNIEAAMAVYGEVGVRVVYARMFFDRMDGRIQGYVDALKARSPQVELCSIMEETAVAKDRITALSDQYHGTAGGRISVWPAPATTTTVTVEGMRWAQAFARDRAVMWTLHMAESDHDERILGWSPAEYMECYGLLDERLQVAHCVYFDRKDVRLLHRHNVKVASQVVSNAYLGSGVAPVPEMVERGMAVGIGTDNNNSCDSVNMIGDMKFMAHIHRAVHRDADVLTPEKILEMATIDGARSLGMDHEIGSIETGKRADLILLDLRHPQTTPHHHLAATIVFQAYGNEVDTVLIDGNVVMENRRLSFLPPERELAFLEEAQSRATAILQRANMVANPAWRSL

SEQ ID NO: 160 - protein, 473 aa, Artificial Sequence
  Description of Artificial Sequence: Synthetic peptide
MQTLSIQHGTLVTMDQYRRVLGDSWVHVQDGRIVALGVHAESVPPPADRVIDARGKVVLPGFINAHTHVNQILLRGGPSHGRQFYDWLFNVLYPGQKAMRPEVAVAVRLYCAEAVRSGITTINEDADSAIYPGNIEAAMAVYGEVGVRVVYARMFFDRMDGRIQGYVDALKARSPQVELCSIMEETAVAKDRITALSDQYHGTAGGRISVWPAPATTTTVTVEGMRWAQAFARDRAVMWTLHMAESDHDERILGWSPAEYMECYGLLDERLQVAHCVYFDRKDVRLLHRHNVKVASQVVSNAYLGSGVAPVPEMVERGMAVGIGTDNNNSSDSVNMIGDMKFMAHIHRAVHRDADVLTPEKILEMATIDGARSLGMDHEIGSIETGKRADLILLDLRHPQTTPHHHLAATIVFQAYGNEVDTVLIDGNVVMENRRLSFLPPERELAFLEEAQSRATAILQRANMVANPAWRSL

SEQ ID NO: 161 - protein, 473 aa, Artificial Sequence
  Description of Artificial Sequence: Synthetic peptide
MQTLSIQHGTLVTMDQYRRVLGDSWVHVQDGRIVALGVHAESVPPPADRVIDARGKVVLPGFINAHTHVNQILLRGGPSHGRQFYDWLFNVLYPGQKAMRPEVAVAVRLYCAEAVRSGITTINEEADSAIYPGNIEAAMAVYGEVGVRVVYARMFFDRMDGRIQGYVDALKARSPQVELCSIMEETAVAKDRITALSDQYHGTAGGRISVWPAPATITPVTVEGMRWAQAFARDRAVMWTLHMAESDHDERIIGGSPAEYMECYGLLDERLQVAHCVYFDRKDVRLLHRHNVKVASQVVSNAYLGSGVAPVPEMVERGMAVGIGTDNDNSCDSVNMIGDMKFMAHIHRAVHRDADVLTPEKILEMATIDGARSLGMDHEIGSIETGKRADLILLDLRHPQTTPHHHLAATIVFQAYGNEVDTVLIDGNVVMENRRLSFLPPERELAFLEEAQSRATAILQRANMVANPAWRSL

SEQ ID NO: 162 - protein, 473 aa, Artificial Sequence
  Description of Artificial Sequence: Synthetic peptide
MQTLSIQHGTLVTMDQYRRVLGDSWVHVQDGRIVALGVHAESVPPPADRVIDARGKVVLPGFINAHTHVNQILLRGGPSHGRQFYDWLFNVLYPGQKAMRPEVAVAVRLYCAEAVRSGITTINEEADSAIYPGNIEAAMAVYGEVGVRVVYARMFFDRMDGRIQGYVDALKARSPQVELCSIMEETAVAKDRITALSDQYHGTAGGRISVWPAPATITPVTVEGMRWAQAFARDRAVMWTLHMAESDHDERIIGGSPAEYMECYGLLDERLQVAHCVYFDRKDVRLLHRHNVKVASQVVSNAYLGSGVAPVPEMVERGMAVGIGTDNDNSSDSVNMIGDMKFMAHIHRAVHRDADVLTPEKILEMATIDGARSLGMDHEIGSIETGKRADLILLDLRHPQTTPHHHLAATIVFQAYGNEVDTVLIDGNVVMENRRLSFLPPERELAFLEEAQSRATAILQRANMVANPAWRSL

SEQ ID NO: 163 - protein, 473 aa, Artificial Sequence
  Description of Artificial Sequence: Synthetic peptide
MQTLSIQHGTLVTMDQYRRVLGDSWVHVQDGRIVALGVHAESVPPPADRVIDARGKVVLPGFINAHTHVNQILLRGGPSHGRQFYDWLFNVLYPGQKAMRPEVAVAVRLYCAEAVRSGITTINEEADSAIYPGNIEAAMAVYGEVGVRVVYARMFFDRMDGRIQGYVDALKARSPQVELCSIMEETAVAKDRITALSDQYHGTAGGRISVWPAPATITPVTVEGMRWAQAFARDRAVMWTLHMAESDHDERIIGGSPAEYMECYGLLDERLQVAHCVYFDRKDVRLLHRHNVKVASQVVSNAYLGSGVAPVPEMVERGMAVGIGTDNNNSCDSVNMIGDMKFMAHIHRAVHRDADVLTPEKILEMATIDGARSLGMDHEIGSIETGKRADLILLDLRHPQTTPHHHLAATIVFQAYGNEVDTVLIDGNVVMENRRLSFLPPERELAFLEEAQSRATAILQRANMVANPAWRSL

SEQ ID NO: 164 - protein, 473 aa, Artificial Sequence
  Description of Artificial Sequence: Synthetic peptide
MQTLSIQHGTLVTMDQYRRVLGDSWVHVQDGRIVALGVHAESVPPPADRVIDARGKVVLPGFINAHTHVNQILLRGGPSHGRQFYDWLFNVLYPGQKAMRPEVAVAVRLYCAEAVRSGITTINEEADSAIYPGNIEAAMAVYGEVGVRVVYARMFFDRMDGRIQGYVDALKARSPQVELCSIMEETAVAKDRITALSDQYHGTAGGRISVWPAPATITPVTVEGMRWAQAFARDRAVMWTLHMAESDHDERIIGGSPAEYMECYGLLDERLQVAHCVYFDRKDVRLLHRHNVKVASQVVSNAYLGSGVAPVPEMVERGMAVGIGTDNNNSSDSVNMIGDMKFMAHIHRAVHRDADVLTPEKILEMATIDGARSLGMDHEIGSIETGKRADLILLDLRHPQTTPHHHLAATIVFQAYGNEVDTVLIDGNVVMENRRLSFLPPERELAFLEEAQSRATAILQRANMVANPAWRSL

SEQ ID NO: 165 - protein, 473 aa, Artificial Sequence
  Description of Artificial Sequence: Synthetic peptide
MQTLSIQHGTLVTMDQYRRVLGDSWVHVQDGRIVALGVHAESVPPPADRVIDARGKVVLPGFINAHTHVNQILLRGGPSHGRQFYDWLFNVLYPGQKAMRPEVAVAVRLYCAEAVRSGITTINEEADSAIYPGNIEAAMAVYGEVGVRVVYARMFFDRMDGRIQGYVDALKARSPQVELCSIMEETAVAKDRITALSDQYHGTAGGRISVWPAPATITPVTVEGMRWAQAFARDRAVMWTLHMAESDHDERIIGWSPAEYMECYGLLDERLQVAHCVYFDRKDVRLLHRHNVKVASQVVSNAYLGSGVAPVPEMVERGMAVGIGTDNDNSCDSVNMIGDMKFMAHIHRAVHRDADVLTPEKILEMATIDGARSLGMDHEIGSIETGKRADLILLDLRHPQTTPHHHLAATIVFQAYGNEVDTVLIDGNVVMENRRLSFLPPERELAFLEEAQSRATAILQRANMVANPAWRSL

SEQ ID NO: 166 - protein, 473 aa, Artificial Sequence
  Description of Artificial Sequence: Synthetic peptide
MQTLSIQHGTLVTMDQYRRVLGDSWVHVQDGRIVALGVHAESVPPPADRVIDARGKVVLPGFINAHTHVNQILLRGGPSHGRQFYDWLFNVLYPGQKAMRPEVAVAVRLYCAEAVRSGITTINEEADSAIYPGNIEAAMAVYGEVGVRVVYARMFFDRMDGRIQGYVDALKARSPQVELCSIMEETAVAKDRITALSDQYHGTAGGRISVWPAPATITPVTVEGMRWAQAFARDRAVMWTLHMAESDHDERIIGWSPAEYMECYGLLDERLQVAHCVYFDRKDVRLLHRHNVKVASQVVSNAYLGSGVAPVPEMVERGMAVGIGTDNDNSSDSVNMIGDMKFMAHIHRAVHRDADVLTPEKILEMATIDGARSLGMDHEIGSIETGKRADLILLDLRHPQTTPHHHLAATIVFQAYGNEVDTVLIDGNVVMENRRLSFLPPERELAFLEEAQSRATAILQRANMVANPAWRSL

SEQ ID NO: 167 - protein, 473 aa, Artificial Sequence
  Description of Artificial Sequence: Synthetic peptide
MQTLSIQHGTLVTMDQYRRVLGDSWVHVQDGRIVALGVHAESVPPPADRVIDARGKVVLPGFINAHTHVNQILLRGGPSHGRQFYDWLFNVLYPGQKAMRPEVAVAVRLYCAEAVRSGITTINEEADSAIYPGNIEAAMAVYGEVGVRVVYARMFFDRMDGRIQGYVDALKARSPQVELCSIMEETAVAKDRITALSDQYHGTAGGRISVWPAPATITPVTVEGMRWAQAFARDRAVMWTLHMAESDHDERIIGWSPAEYMECYGLLDERLQVAHCVYFDRKDVRLLHRHNVKVASQVVSNAYLGSGVAPVPEMVERGMAVGIGTDNNNSCDSVNMIGDMKFMAHIHRAVHRDADVLTPEKILEMATIDGARSLGMDHEIGSIETGKRADLILLDLRHPQTTPHHHLAATIVFQAYGNEVDTVLIDGNVVMENRRLSFLPPERELAFLEEAQSRATAILQRANMVANPAWRSL

SEQ ID NO: 168 - protein, 473 aa, Artificial Sequence
  Description of Artificial Sequence: Synthetic peptide
MQTLSIQHGTLVTMDQYRRVLGDSWVHVQDGRIVALGVHAESVPPPADRVIDARGKVVLPGFINAHTHVNQILLRGGPSHGRQFYDWLFNVLYPGQKAMRPEVAVAVRLYCAEAVRSGITTINEEADSAIYPGNIEAAMAVYGEVGVRVVYARMFFDRMDGRIQGYVDALKARSPQVELCSIMEETAVAKDRITALSDQYHGTAGGRISVWPAPATITPVTVEGMRWAQAFARDRAVMWTLHMAESDHDERIIGWSPAEYMECYGLLDERLQVAHCVYFDRKDVRLLHRHNVKVASQVVSNAYLGSGVAPVPEMVERGMAVGIGTDNNNSSDSVNMIGDMKFMAHIHRAVHRDADVLTPEKILEMATIDGARSLGMDHEIGSIETGKRADLILLDLRHPQTTPHHHLAATIVFQAYGNEVDTVLIDGNVVMENRRLSFLPPERELAFLEEAQSRATAILQRANMVANPAWRSL

SEQ ID NO: 169 - protein, 473 aa, Artificial Sequence
  Description of Artificial Sequence: Synthetic peptide
MQTLSIQHGTLVTMDQYRRVLGDSWVHVQDGRIVALGVHAESVPPPADRVIDARGKVVLPGFINAHTHVNQILLRGGPSHGRQFYDWLFNVLYPGQKAMRPEVAVAVRLYCAEAVRSGITTINEEADSAIYPGNIEAAMAVYGEVGVRVVYARMFFDRMDGRIQGYVDALKARSPQVELCSIMEETAVAKDRITALSDQYHGTAGGRISVWPAPATITPVTVEGMRWAQAFARDRAVMWTLHMAESDHDERILGGSPAEYMECYGLLDERLQVAHCVYFDRKDVRLLHRHNVKVASQVVSNAYLGSGVAPVPEMVERGMAVGIGTDNDNSCDSVNMIGDMKFMAHIHRAVHRDADVLTPEKILEMATIDGARSLGMDHEIGSIETGKRADLILLDLRHPQTTPHHHLAATIVFQAYGNEVDTVLIDGNVVMENRRLSFLPPERELAFLEEAQSRATAILQRANMVANPAWRSL

SEQ ID NO: 170 - protein, 473 aa, Artificial Sequence
  Description of Artificial Sequence: Synthetic peptide
MQTLSIQHGTLVTMDQYRRVLGDSWVHVQDGRIVALGVHAESVPPPADRVIDARGKVVLPGFINAHTHVNQILLRGGPSHGRQFYDWLFNVLYPGQKAMRPEVAVAVRLYCAEAVRSGITTINEEADSAIYPGNIEAAMAVYGEVGVRVVYARMFFDRMDGRIQGYVDALKARSPQVELCSIMEETAVAKDRITALSDQYHGTAGGRISVWPAPATITPVTVEGMRWAQAFARDRAVMWTLHMAESDHDERILGGSPAEYMECYGLLDERLQVAHCVYFDRKDVRLLHRHNVKVASQVVSNAYLGSGVAPVPEMVERGMAVGIGTDNDNSSDSVNMIGDMKFMAHIHRAVHRDADVLTPEKILEMATIDGARSLGMDHEIGSIETGKRADLILLDLRHPQTTPHHHLAATIVFQAYGNEVDTVLIDGNVVMENRRLSFLPPERELAFLEEAQSRATAILQRANMVANPAWRSL

SEQ ID NO: 171 - protein, 473 aa, Artificial Sequence
  Description of Artificial Sequence: Synthetic peptide
MQTLSIQHGTLVTMDQYRRVLGDSWVHVQDGRIVALGVHAESVPPPADRVIDARGKVVLPGFINAHTHVNQILLRGGPSHGRQFYDWLFNVLYPGQKAMRPEVAVAVRLYCAEAVRSGITTINEEADSAIYPGNIEAAMAVYGEVGVRVVYARMFFDRMDGRIQGYVDALKARSPQVELCSIMEETAVAKDRITALSDQYHGTAGGRISVWPAPATITPVTVEGMRWAQAFARDRAVMWTLHMAESDHDERILGGSPAEYMECYGLLDERLQVAHCVYFDRKDVRLLHRHNVKVASQVVSNAYLGSGVAPVPEMVERGMAVGIGTDNNNSCDSVNMIGDMKFMAHIHRAVHRDADVLTPEKILEMATIDGARSLGMDHEIGSIETGKRADLILLDLRHPQTTPHHHLAATIVFQAYGNEVDTVLIDGNVVMENRRLSFLPPERELAFLEEAQSRATAILQRANMVANPAWRSL

SEQ ID NO: 172 - protein, 473 aa, Artificial Sequence
  Description of Artificial Sequence: Synthetic peptide
MQTLSIQHGTLVTMDQYRRVLGDSWVHVQDGRIVALGVHAESVPPPADRVIDARGKVVLPGFINAHTHVNQILLRGGPSHGRQFYDWLFNVLYPGQKAMRPEVAVAVRLYCAEAVRSGITTINEEADSAIYPGNIEAAMAVYGEVGVRVVYARMFFDRMDGRIQGYVDALKARSPQVELCSIMEETAVAKDRITALSDQYHGTAGGRISVWPAPATITPVTVEGMRWAQAFARDRAVMWTLHMAESDHDERILGGSPAEYMECYGLLDERLQVAHCVYFDRKDVRLLHRHNVKVASQVVSNAYLGSGVAPVPEMVERGMAVGIGTDNNNSSDSVNMIGDMKFMAHIHRAVHRDADVLTPEKILEMATIDGARSLGMDHEIGSIETGKRADLILLDLRHPQTTPHHHLAATIVFQAYGNEVDTVLIDGNVVMENRRLSFLPPERELAFLEEAQSRATAILQRANMVANPAWRSL

SEQ ID NO: 173 - protein, 473 aa, Artificial Sequence
  Description of Artificial Sequence: Synthetic peptide
MQTLSIQHGTLVTMDQYRRVLGDSWVHVQDGRIVALGVHAESVPPPADRVIDARGKVVLPGFINAHTHVNQILLRGGPSHGRQFYDWLFNVLYPGQKAMRPEVAVAVRLYCAEAVRSGITTINEEADSAIYPGNIEAAMAVYGEVGVRVVYARMFFDRMDGRIQGYVDALKARSPQVELCSIMEETAVAKDRITALSDQYHGTAGGRISVWPAPATITPVTVEGMRWAQAFARDRAVMWTLHMAESDHDERILGWSPAEYMECYGLLDERLQVAHCVYFDRKDVRLLHRHNVKVASQVVSNAYLGSGVAPVPEMVERGMAVGIGTDNDNSCDSVNMIGDMKFMAHIHRAVHRDADVLTPEKILEMATIDGARSLGMDHEIGSIETGKRADLILLDLRHPQTTPHHHLAATIVFQAYGNEVDTVLIDGNVVMENRRLSFLPPERELAFLEEAQSRATAILQRANMVANPAWRSL

SEQ ID NO: 174 - protein, 473 aa, Artificial Sequence
  Description of Artificial Sequence: Synthetic peptide
MQTLSIQHGTLVTMDQYRRVLGDSWVHVQDGRIVALGVHAESVPPPADRVIDARGKVVLPGFINAHTHVNQILLRGGPSHGRQFYDWLFNVLYPGQKAMRPEVAVAVRLYCAEAVRSGITTINEEADSAIYPGNIEAAMAVYGEVGVRVVYARMFFDRMDGRIQGYVDALKARSPQVELCSIMEETAVAKDRITALSDQYHGTAGGRISVWPAPATITPVTVEGMRWAQAFARDRAVMWTLHMAESDHDERILGWSPAEYMECYGLLDERLQVAHCVYFDRKDVRLLHRHNVKVASQVVSNAYLGSGVAPVPEMVERGMAVGIGTDNDNSSDSVNMIGDMKFMAHIHRAVHRDADVLTPEKILEMATIDGARSLGMDHEIGSIETGKRADLILLDLRHPQTTPHHHLAATIVFQAYGNEVDTVLIDGNVVMENRRLSFLPPERELAFLEEAQSRATAILQRANMVANPAWRSL

SEQ ID NO: 175 - protein, 473 aa, Artificial Sequence
  Description of Artificial Sequence: Synthetic peptide
MQTLSIQHGTLVTMDQYRRVLGDSWVHVQDGRIVALGVHAESVPPPADRVIDARGKVVLPGFINAHTHVNQILLRGGPSHGRQFYDWLFNVLYPGQKAMRPEVAVAVRLYCAEAVRSGITTINEEADSAIYPGNIEAAMAVYGEVGVRVVYARMFFDRMDGRIQGYVDALKARSPQVELCSIMEETAVAKDRITALSDQYHGTAGGRISVWPAPATITPVTVEGMRWAQAFARDRAVMWTLHMAESDHDERILGWSPAEYMECYGLLDERLQVAHCVYFDRKDVRLLHRHNVKVASQVVSNAYLGSGVAPVPEMVERGMAVGIGTDNNNSCDSVNMIGDMKFMAHIHRAVHRDADVLTPEKILEMATIDGARSLGMDHEIGSIETGKRADLILLDLRHPQTTPHHHLAATIVFQAYGNEVDTVLIDGNVVMENRRLSFLPPERELAFLEEAQSRATAILQRANMVANPAWRSL

SEQ ID NO: 176 - protein, 473 aa, Artificial Sequence
  Description of Artificial Sequence: Synthetic peptide
MQTLSIQHGTLVTMDQYRRVLGDSWVHVQDGRIVALGVHAESVPPPADRVIDARGKVVLPGFINAHTHVNQILLRGGPSHGRQFYDWLFNVLYPGQKAMRPEVAVAVRLYCAEAVRSGITTINEEADSAIYPGNIEAAMAVYGEVGVRVVYARMFFDRMDGRIQGYVDALKARSPQVELCSIMEETAVAKDRITALSDQYHGTAGGRISVWPAPATITPVTVEGMRWAQAFARDRAVMWTLHMAESDHDERILGWSPAEYMECYGLLDERLQVAHCVYFDRKDVRLLHRHNVKVASQVVSNAYLGSGVAPVPEMVERGMAVGIGTDNNNSSDSVNMIGDMKFMAHIHRAVHRDADVLTPEKILEMATIDGARSLGMDHEIGSIETGKRADLILLDLRHPQTTPHHHLAATIVFQAYGNEVDTVLIDGNVVMENRRLSFLPPERELAFLEEAQSRATAILQRANMVANPAWRSL

SEQ ID NO: 177 - protein, 473 aa, Artificial Sequence
  Description of Artificial Sequence: Synthetic peptide
MQTLSIQHGTLVTMDQYRRVLGDSWVHVQDGRIVALGVHAESVPPPADRVIDARGKVVLPGFINAHTHVNQILLRGGPSHGRQFYDWLFNVLYPGQKAMRPEVAVAVRLYCAEAVRSGITTINEEADSAIYPGNIEAAMAVYGEVGVRVVYARMFFDRMDGRIQGYVDALKARSPQVELCSIMEETAVAKDRITALSDQYHGTAGGRISVWPAPATITTVTVEGMRWAQAFARDRAVMWTLHMAESDHDERIIGGSPAEYMECYGLLDERLQVAHCVYFDRKDVRLLHRHNVKVASQVVSNAYLGSGVAPVPEMVERGMAVGIGTDNDNSCDSVNMIGDMKFMAHIHRAVHRDADVLTPEKILEMATIDGARSLGMDHEIGSIETGKRADLILLDLRHPQTTPHHHLAATIVFQAYGNEVDTVLIDGNVVMENRRLSFLPPERELAFLEEAQSRATAILQRANMVANPAWRSL

SEQ ID NO: 178 - protein, 473 aa, Artificial Sequence
  Description of Artificial Sequence: Synthetic peptide
MQTLSIQHGTLVTMDQYRRVLGDSWVHVQDGRIVALGVHAESVPPPADRVIDARGKVVLPGFINAHTHVNQILLRGGPSHGRQFYDWLFNVLYPGQKAMRPEVAVAVRLYCAEAVRSGITTINEEADSAIYPGNIEAAMAVYGEVGVRVVYARMFFDRMDGRIQGYVDALKARSPQVELCSIMEETAVAKDRITALSDQYHGTAGGRISVWPAPATITTVTVEGMRWAQAFARDRAVMWTLHMAESDHDERIIGGSPAEYMECYGLLDERLQVAHCVYFDRKDVRLLHRHNVKVASQVVSNAYLGSGVAPVPEMVERGMAVGIGTDNDNSSDSVNMIGDMKFMAHIHRAVHRDADVLTPEKILEMATIDGARSLGMDHEIGSIETGKRADLILLDLRHPQTTPHHHLAATIVFQAYGNEVDTVLIDGNVVMENRRLSFLPPERELAFLEEAQSRATAILQRANMVANPAWRSL

SEQ ID NO: 179 - protein, 473 aa, Artificial Sequence
  Description of Artificial Sequence: Synthetic peptide
MQTLSIQHGTLVTMDQYRRVLGDSWVHVQDGRIVALGVHAESVPPPADRVIDARGKVVLPGFINAHTHVNQILLRGGPSHGRQFYDWLFNVLYPGQKAMRPEVAVAVRLYCAEAVRSGITTINEEADSAIYPGNIEAAMAVYGEVGVRVVYARMFFDRMDGRIQGYVDALKARSPQVELCSIMEETAVAKDRITALSDQYHGTAGGRISVWPAPATITTVTVEGMRWAQAFARDRAVMWTLHMAESDHDERIIGGSPAEYMECYGLLDERLQVAHCVYFDRKDVRLLHRHNVKVASQVVSNAYLGSGVAPVPEMVERGMAVGIGTDNNNSCDSVNMIGDMKFMAHIHRAVHRDADVLTPEKILEMATIDGARSLGMDHEIGSIETGKRADLILLDLRHPQTTPHHHLAATIVFQAYGNEVDTVLIDGNVVMENRRLSFLPPERELAFLEEAQSRATAILQRANMVANPAWRSL

SEQ ID NO: 180 - protein, 473 aa, Artificial Sequence
  Description of Artificial Sequence: Synthetic peptide
MQTLSIQHGTLVTMDQYRRVLGDSWVHVQDGRIVALGVHAESVPPPADRVIDARGKVVLPGFINAHTHVNQILLRGGPSHGRQFYDWLFNVLYPGQKAMRPEVAVAVRLYCAEAVRSGITTINEEADSAIYPGNIEAAMAVYGEVGVRVVYARMFFDRMDGRIQGYVDALKARSPQVELCSIMEETAVAKDRITALSDQYHGTAGGRISVWPAPATITTVTVEGMRWAQAFARDRAVMWTLHMAESDHDERIIGGSPAEYMECYGLLDERLQVAHCVYFDRKDVRLLHRHNVKVASQVVSNAYLGSGVAPVPEMVERGMAVGIGTDNNNSSDSVNMIGDMKFMAHIHRAVHRDADVLTPEKILEMATIDGARSLGMDHEIGSIETGKRADLILLDLRHPQTTPHHHLAATIVFQAYGNEVDTVLIDGNVVMENRRLSFLPPERELAFLEEAQSRATAILQRANMVANPAWRSL

SEQ ID NO: 181 - protein, 473 aa, Artificial Sequence
  Description of Artificial Sequence: Synthetic peptide
MQTLSIQHGTLVTMDQYRRVLGDSWVHVQDGRIVALGVHAESVPPPADRVIDARGKVVLPGFINAHTHVNQILLRGGPSHGRQFYDWLFNVLYPGQKAMRPEVAVAVRLYCAEAVRSGITTINEEADSAIYPGNIEAAMAVYGEVGVRVVYARMFFDRMDGRIQGYVDALKARSPQVELCSIMEETAVAKDRITALSDQYHGTAGGRISVWPAPATITTVTVEGMRWAQAFARDRAVMWTLHMAESDHDERIIGWSPAEYMECYGLLDERLQVAHCVYFDRKDVRLLHRHNVKVASQVVSNAYLGSGVAPVPEMVERGMAVGIGTDNDNSCDSVNMIGDMKFMAHIHRAVHRDADVLTPEKILEMATIDGARSLGMDHEIGSIETGKRADLILLDLRHPQTTPHHHLAATIVFQAYGNEVDTVLIDGNVVMENRRLSFLPPERELAFLEEAQSRATAILQRANMVANPAWRSL

SEQ ID NO: 182 - protein, 473 aa, Artificial Sequence
  Description of Artificial Sequence: Synthetic peptide
MQTLSIQHGTLVTMDQYRRVLGDSWVHVQDGRIVALGVHAESVPPPADRVIDARGKVVLPGFINAHTHVNQILLRGGPSHGRQFYDWLFNVLYPGQKAMRPEVAVAVRLYCAEAVRSGITTINEEADSAIYPGNIEAAMAVYGEVGVRVVYARMFFDRMDGRIQGYVDALKARSPQVELCSIMEETAVAKDRITALSDQYHGTAGGRISVWPAPATITTVTVEGMRWAQAFARDRAVMWTLHMAESDHDERIIGWSPAEYMECYGLLDERLQVAHCVYFDRKDVRLLHRHNVKVASQVVSNAYLGSGVAPVPEMVERGMAVGIGTDNDNSSDSVNMIGDMKFMAHIHRAVHRDADVLTPEKILEMATIDGARSLGMDHEIGSIETGKRADLILLDLRHPQTTPHHHLAATIVFQAYGNEVDTVLIDGNVVMENRRLSFLPPERELAFLEEAQSRATAILQRANMVANPAWRSL

SEQ ID NO: 183 - protein, 473 aa, Artificial Sequence
  Description of Artificial Sequence: Synthetic peptide
MQTLSIQHGTLVTMDQYRRVLGDSWVHVQDGRIVALGVHAESVPPPADRVIDARGKVVLPGFINAHTHVNQILLRGGPSHGRQFYDWLFNVLYPGQKAMRPEVAVAVRLYCAEAVRSGITTINEEADSAIYPGNIEAAMAVYGEVGVRVVYARMFFDRMDGRIQGYVDALKARSPQVELCSIMEETAVAKDRITALSDQYHGTAGGRISVWPAPATITTVTVEGMRWAQAFARDRAVMWTLHMAESDHDERIIGWSPAEYMECYGLLDERLQVAHCVYFDRKDVRLLHRHNVKVASQVVSNAYLGSGVAPVPEMVERGMAVGIGTDNNNSCDSVNMIGDMKFMAHIHRAVHRDADVLTPEKILEMATIDGARSLGMDHEIGSIETGKRADLILLDLRHPQTTPHHHLAATIVFQAYGNEVDTVLIDGNVVMENRRLSFLPPERELAFLEEAQSRATAILQRANMVANPAWRSL

SEQ ID NO: 184 - protein, 473 aa, Artificial Sequence
  Description of Artificial Sequence: Synthetic peptide
MQTLSIQHGTLVTMDQYRRVLGDSWVHVQDGRIVALGVHAESVPPPADRVIDARGKVVLPGFINAHTHVNQILLRGGPSHGRQFYDWLFNVLYPGQKAMRPEVAVAVRLYCAEAVRSGITTINEEADSAIYPGNIEAAMAVYGEVGVRVVYARMFFDRMDGRIQGYVDALKARSPQVELCSIMEETAVAKDRITALSDQYHGTAGGRISVWPAPATITTVTVEGMRWAQAFARDRAVMWTLHMAESDHDERIIGWSPAEYMECYGLLDERLQVAHCVYFDRKDVRLLHRHNVKVASQVVSNAYLGSGVAPVPEMVERGMAVGIGTDNNNSSDSVNMIGDMKFMAHIHRAVHRDADVLTPEKILEMATIDGARSLGMDHEIGSIETGKRADLILLDLRHPQTTPHHHLAATIVFQAYGNEVDTVLIDGNVVMENRRLSFLPPERELAFLEEAQSRATAILQRANMVANPAWRSL

SEQ ID NO: 185 - protein, 473 aa, Artificial Sequence
  Description of Artificial Sequence: Synthetic peptide
MQTLSIQHGTLVTMDQYRRVLGDSWVHVQDGRIVALGVHAESVPPPADRVIDARGKVVLPGFINAHTHVNQILLRGGPSHGRQFYDWLFNVLYPGQKAMRPEVAVAVRLYCAEAVRSGITTINEEADSAIYPGNIEAAMAVYGEVGVRVVYARMFFDRMDGRIQGYVDALKARSPQVELCSIMEETAVAKDRITALSDQYHGTAGGRISVWPAPATITTVTVEGMRWAQAFARDRAVMWTLHMAESDHDERILGGSPAEYMECYGLLDERLQVAHCVYFDRKDVRLLHRHNVKVASQVVSNAYLGSGVAPVPEMVERGMAVGIGTDNDNSCDSVNMIGDMKFMAHIHRAVHRDADVLTPEKILEMATIDGARSLGMDHEIGSIETGKRADLILLDLRHPQTTPHHHLAATIVFQAYGNEVDTVLIDGNVVMENRRLSFLPPERELAFLEEAQSRATAILQRANMVANPAWRSL

SEQ ID NO: 186 - protein, 473 aa, Artificial Sequence
  Description of Artificial Sequence: Synthetic peptide
MQTLSIQHGTLVTMDQYRRVLGDSWVHVQDGRIVALGVHAESVPPPADRVIDARGKVVLPGFINAHTHVNQILLRGGPSHGRQFYDWLFNVLYPGQKAMRPEVAVAVRLYCAEAVRSGITTINEEADSAIYPGNIEAAMAVYGEVGVRVVYARMFFDRMDGRIQGYVDALKARSPQVELCSIMEETAVAKDRITALSDQYHGTAGGRISVWPAPATITTVTVEGMRWAQAFARDRAVMWTLHMAESDHDERILGGSPAEYMECYGLLDERLQVAHCVYFDRKDVRLLHRHNVKVASQVVSNAYLGSGVAPVPEMVERGMAVGIGTDNDNSSDSVNMIGDMKFMAHIHRAVHRDADVLTPEKILEMATIDGARSLGMDHEIGSIETGKRADLILLDLRHPQTTPHHHLAATIVFQAYGNEVDTVLIDGNVVMENRRLSFLPPERELAFLEEAQSRATAILQRANMVANPAWRSL

SEQ ID NO: 187 - protein, 473 aa, Artificial Sequence
  Description of Artificial Sequence: Synthetic peptide
MQTLSIQHGTLVTMDQYRRVLGDSWVHVQDGRIVALGVHAESVPPPADRVIDARGKVVLPGFINAHTHVNQILLRGGPSHGRQFYDWLFNVLYPGQKAMRPEVAVAVRLYCAEAVRSGITTINEEADSAIYPGNIEAAMAVYGEVGVRVVYARMFFDRMDGRIQGYVDALKARSPQVELCSIMEETAVAKDRITALSDQYHGTAGGRISVWPAPATITTVTVEGMRWAQAFARDRAVMWTLHMAESDHDERILGGSPAEYMECYGLLDERLQVAHCVYFDRKDVRLLHRHNVKVASQVVSNAYLGSGVAPVPEMVERGMAVGIGTDNNNSCDSVNMIGDMKFMAHIHRAVHRDADVLTPEKILEMATIDGARSLGMDHEIGSIETGKRADLILLDLRHPQTTPHHHLAATIVFQAYGNEVDTVLIDGNVVMENRRLSFLPPERELAFLEEAQSRATAILQRANMVANPAWRSL

SEQ ID NO: 188 - protein, 473 aa, Artificial Sequence
  Description of Artificial Sequence: Synthetic peptide
MQTLSIQHGTLVTMDQYRRVLGDSWVHVQDGRIVALGVHAESVPPPADRVIDARGKVVLPGFINAHTHVNQILLRGGPSHGRQFYDWLFNVLYPGQKAMRPEVAVAVRLYCAEAVRSGITTINEEADSAIYPGNIEAAMAVYGEVGVRVVYARMFFDRMDGRIQGYVDALKARSPQVELCSIMEETAVAKDRITALSDQYHGTAGGRISVWPAPATITTVTVEGMRWAQAFARDRAVMWTLHMAESDHDERILGGSPAEYMECYGLLDERLQVAHCVYFDRKDVRLLHRHNVKVASQVVSNAYLGSGVAPVPEMVERGMAVGIGTDNNNSSDSVNMIGDMKFMAHIHRAVHRDADVLTPEKILEMATIDGARSLGMDHEIGSIETGKRADLILLDLRHPQTTPHHHLAATIVFQAYGNEVDTVLIDGNVVMENRRLSFLPPERELAFLEEAQSRATAILQRANMVANPAWRSL

SEQ ID NO: 189 - protein, 473 aa, Artificial Sequence
  Description of Artificial Sequence: Synthetic peptide
MQTLSIQHGTLVTMDQYRRVLGDSWVHVQDGRIVALGVHAESVPPPADRVIDARGKVVLPGFINAHTHVNQILLRGGPSHGRQFYDWLFNVLYPGQKAMRPEVAVAVRLYCAEAVRSGITTINEEADSAIYPGNIEAAMAVYGEVGVRVVYARMFFDRMDGRIQGYVDALKARSPQVELCSIMEETAVAKDRITALSDQYHGTAGGRISVWPAPATITTVTVEGMRWAQAFARDRAVMWTLHMAESDHDERILGWSPAEYMECYGLLDERLQVAHCVYFDRKDVRLLHRHNVKVASQVVSNAYLGSGVAPVPEMVERGMAVGIGTDNDNSCDSVNMIGDMKFMAHIHRAVHRDADVLTPEKILEMATIDGARSLGMDHEIGSIETGKRADLILLDLRHPQTTPHHHLAATIVFQAYGNEVDTVLIDGNVVMENRRLSFLPPERELAFLEEAQSRATAILQRANMVANPAWRSL

SEQ ID NO: 190 - protein, 473 aa, Artificial Sequence
  Description of Artificial Sequence: Synthetic peptide
MQTLSIQHGTLVTMDQYRRVLGDSWVHVQDGRIVALGVHAESVPPPADRVIDARGKVVLPGFINAHTHVNQILLRGGPSHGRQFYDWLFNVLYPGQKAMRPEVAVAVRLYCAEAVRSGITTINEEADSAIYPGNIEAAMAVYGEVGVRVVYARMFFDRMDGRIQGYVDALKARSPQVELCSIMEETAVAKDRITALSDQYHGTAGGRISVWPAPATITTVTVEGMRWAQAFARDRAVMWTLHMAESDHDERILGWSPAEYMECYGLLDERLQVAHCVYFDRKDVRLLHRHNVKVASQVVSNAYLGSGVAPVPEMVERGMAVGIGTDNDNSSDSVNMIGDMKFMAHIHRAVHRDADVLTPEKILEMATIDGARSLGMDHEIGSIETGKRADLILLDLRHPQTTPHHHLAATIVFQAYGNEVDTVLIDGNVVMENRRLSFLPPERELAFLEEAQSRATAILQRANMVANPAWRSL

SEQ ID NO: 191 - protein, 473 aa, Artificial Sequence
  Description of Artificial Sequence: Synthetic peptide
MQTLSIQHGTLVTMDQYRRVLGDSWVHVQDGRIVALGVHAESVPPPADRVIDARGKVVLPGFINAHTHVNQILLRGGPSHGRQFYDWLFNVLYPGQKAMRPEVAVAVRLYCAEAVRSGITTINEEADSAIYPGNIEAAMAVYGEVGVRVVYARMFFDRMDGRIQGYVDALKARSPQVELCSIMEETAVAKDRITALSDQYHGTAGGRISVWPAPATITTVTVEGMRWAQAFARDRAVMWTLHMAESDHDERILGWSPAEYMECYGLLDERLQVAHCVYFDRKDVRLLHRHNVKVASQVVSNAYLGSGVAPVPEMVERGMAVGIGTDNNNSCDSVNMIGDMKFMAHIHRAVHRDADVLTPEKILEMATIDGARSLGMDHEIGSIETGKRADLILLDLRHPQTTPHHHLAATIVFQAYGNEVDTVLIDGNVVMENRRLSFLPPERELAFLEEAQSRATAILQRANMVANPAWRSL

SEQ ID NO: 192 - protein, 473 aa, Artificial Sequence
  Description of Artificial Sequence: Synthetic peptide
MQTLSIQHGTLVTMDQYRRVLGDSWVHVQDGRIVALGVHAESVPPPADRVIDARGKVVLPGFINAHTHVNQILLRGGPSHGRQFYDWLFNVLYPGQKAMRPEVAVAVRLYCAEAVRSGITTINEEADSAIYPGNIEAAMAVYGEVGVRVVYARMFFDRMDGRIQGYVDALKARSPQVELCSIMEETAVAKDRITALSDQYHGTAGGRISVWPAPATITTVTVEGMRWAQAFARDRAVMWTLHMAESDHDERILGWSPAEYMECYGLLDERLQVAHCVYFDRKDVRLLHRHNVKVASQVVSNAYLGSGVAPVPEMVERGMAVGIGTDNNNSSDSVNMIGDMKFMAHIHRAVHRDADVLTPEKILEMATIDGARSLGMDHEIGSIETGKRADLILLDLRHPQTTPHHHLAATIVFQAYGNEVDTVLIDGNVVMENRRLSFLPPERELAFLEEAQSRATAILQRANMVANPAWRSL

SEQ ID NO: 193 - protein, 473 aa, Artificial Sequence
  Description of Artificial Sequence: Synthetic peptide
MQTLSIQHGTLVTMDQYRRVLGDSWVHVQDGRIVALGVHAESVPPPADRVIDARGKVVLPGFINAHTHVNQILLRGGPSHGRQFYDWLFNVLYPGQKAMRPEVAVAVRLYCAEAVRSGITTINEEADSAIYPGNIEAAMAVYGEVGVRVVYARMFFDRMDGRIQGYVDALKARSPQVELCSIMEETAVAKDRITALSDQYHGTAGGRISVWPAPATTTPVTVEGMRWAQAFARDRAVMWTLHMAESDHDERIIGGSPAEYMECYGLLDERLQVAHCVYFDRKDVRLLHRHNVKVASQVVSNAYLGSGVAPVPEMVERGMAVGIGTDNDNSCDSVNMIGDMKFMAHIHRAVHRDADVLTPEKILEMATIDGARSLGMDHEIGSIETGKRADLILLDLRHPQTTPHHHLAATIVFQAYGNEVDTVLIDGNVVMENRRLSFLPPERELAFLEEAQSRATAILQRANMVANPAWRSL

SEQ ID NO: 194 - protein, 473 aa, Artificial Sequence
  Description of Artificial Sequence: Synthetic peptide
MQTLSIQHGTLVTMDQYRRVLGDSWVHVQDGRIVALGVHAESVPPPADRVIDARGKVVLPGFINAHTHVNQILLRGGPSHGRQFYDWLFNVLYPGQKAMRPEVAVAVRLYCAEAVRSGITTINEEADSAIYPGNIEAAMAVYGEVGVRVVYARMFFDRMDGRIQGYVDALKARSPQVELCSIMEETAVAKDRITALSDQYHGTAGGRISVWPAPATTTPVTVEGMRWAQAFARDRAVMWTLHMAESDHDERIIGGSPAEYMECYGLLDERLQVAHCVYFDRKDVRLLHRHNVKVASQVVSNAYLGSGVAPVPEMVERGMAVGIGTDNDNSSDSVNMIGDMKFMAHIHRAVHRDADVLTPEKILEMATIDGARSLGMDHEIGSIETGKRADLILLDLRHPQTTPHHHLAATIVFQAYGNEVDTVLIDGNVVMENRRLSFLPPERELAFLEEAQSRATAILQRANMVANPAWRSL

SEQ ID NO: 195 - protein, 473 aa, Artificial Sequence
  Description of Artificial Sequence: Synthetic peptide
MQTLSIQHGTLVTMDQYRRVLGDSWVHVQDGRIVALGVHAESVPPPADRVIDARGKVVLPGFINAHTHVNQILLRGGPSHGRQFYDWLFNVLYPGQKAMRPEVAVAVRLYCAEAVRSGITTINEEADSAIYPGNIEAAMAVYGEVGVRVVYARMFFDRMDGRIQGYVDALKARSPQVELCSIMEETAVAKDRITALSDQYHGTAGGRISVWPAPATTTPVTVEGMRWAQAFARDRAVMWTLHMAESDHDERIIGGSPAEYMECYGLLDERLQVAHCVYFDRKDVRLLHRHNVKVASQVVSNAYLGSGVAPVPEMVERGMAVGIGTDNNNSCDSVNMIGDMKFMAHIHRAVHRDADVLTPEKILEMATIDGARSLGMDHEIGSIETGKRADLILLDLRHPQTTPHHHLAATIVFQAYGNEVDTVLIDGNVVMENRRLSFLPPERELAFLEEAQSRATAILQRANMVANPAWRSL

SEQ ID NO: 196 - protein, 473 aa, Artificial Sequence
  Description of Artificial Sequence: Synthetic peptide
MQTLSIQHGTLVTMDQYRRVLGDSWVHVQDGRIVALGVHAESVPPPADRVIDARGKVVLPGFINAHTHVNQILLRGGPSHGRQFYDWLFNVLYPGQKAMRPEVAVAVRLYCAEAVRSGITTINEEADSAIYPGNIEAAMAVYGEVGVRVVYARMFFDRMDGRIQGYVDALKARSPQVELCSIMEETAVAKDRITALSDQYHGTAGGRISVWPAPATTTPVTVEGMRWAQAFARDRAVMWTLHMAESDHDERIIGGSPAEYMECYGLLDERLQVAHCVYFDRKDVRLLHRHNVKVASQVVSNAYLGSGVAPVPEMVERGMAVGIGTDNNNSSDSVNMIGDMKFMAHIHRAVHRDADVLTPEKILEMATIDGARSLGMDHEIGSIETGKRADLILLDLRHPQTTPHHHLAATIVFQAYGNEVDTVLIDGNVVMENRRLSFLPPERELAFLEEAQSRATAILQRANMVANPAWRSL

SEQ ID NO: 197 - protein, 473 aa, Artificial Sequence
  Description of Artificial Sequence: Synthetic peptide
MQTLSIQHGTLVTMDQYRRVLGDSWVHVQDGRIVALGVHAESVPPPADRVIDARGKVVLPGFINAHTHVNQILLRGGPSHGRQFYDWLFNVLYPGQKAMRPEVAVAVRLYCAEAVRSGITTINEEADSAIYPGNIEAAMAVYGEVGVRVVYARMFFDRMDGRIQGYVDALKARSPQVELCSIMEETAVAKDRITALSDQYHGTAGGRISVWPAPATTTPVTVEGMRWAQAFARDRAVMWTLHMAESDHDERIIGWSPAEYMECYGLLDERLQVAHCVYFDRKDVRLLHRHNVKVASQVVSNAYLGSGVAPVPEMVERGMAVGIGTDNDNSCDSVNMIGDMKFMAHIHRAVHRDADVLTPEKILEMATIDGARSLGMDHEIGSIETGKRADLILLDLRHPQTTPHHHLAATIVFQAYGNEVDTVLIDGNVVMENRRLSFLPPERELAFLEEAQSRATAILQRANMVANPAWRSL

SEQ ID NO: 198 - protein, 473 aa, Artificial Sequence
  Description of Artificial Sequence: Synthetic peptide
MQTLSIQHGTLVTMDQYRRVLGDSWVHVQDGRIVALGVHAESVPPPADRVIDARGKVVLPGFINAHTHVNQILLRGGPSHGRQFYDWLFNVLYPGQKAMRPEVAVAVRLYCAEAVRSGITTINEEADSAIYPGNIEAAMAVYGEVGVRVVYARMFFDRMDGRIQGYVDALKARSPQVELCSIMEETAVAKDRITALSDQYHGTAGGRISVWPAPATTTPVTVEGMRWAQAFARDRAVMWTLHMAESDHDERIIGWSPAEYMECYGLLDERLQVAHCVYFDRKDVRLLHRHNVKVASQVVSNAYLGSGVAPVPEMVERGMAVGIGTDNDNSSDSVNMIGDMKFMAHIHRAVHRDADVLTPEKILEMATIDGARSLGMDHEIGSIETGKRADLILLDLRHPQTTPHHHLAATIVFQAYGNEVDTVLIDGNVVMENRRLSFLPPERELAFLEEAQSRATAILQRANMVANPAWRSL

SEQ ID NO: 199 - protein, 473 aa, Artificial Sequence
  Description of Artificial Sequence: Synthetic peptide
MQTLSIQHGTLVTMDQYRRVLGDSWVHVQDGRIVALGVHAESVPPPADRVIDARGKVVLPGFINAHTHVNQILLRGGPSHGRQFYDWLFNVLYPGQKAMRPEVAVAVRLYCAEAVRSGITTINEEADSAIYPGNIEAAMAVYGEVGVRVVYARMFFDRMDGRIQGYVDALKARSPQVELCSIMEETAVAKDRITALSDQYHGTAGGRISVWPAPATTTPVTVEGMRWAQAFARDRAVMWTLHMAESDHDERIIGWSPAEYMECYGLLDERLQVAHCVYFDRKDVRLLHRHNVKVASQVVSNAYLGSGVAPVPEMVERGMAVGIGTDNNNSCDSVNMIGDMKFMAHIHRAVHRDADVLTPEKILEMATIDGARSLGMDHEIGSIETGKRADLILLDLRHPQTTPHHHLAATIVFQAYGNEVDTVLIDGNVVMENRRLSFLPPERELAFLEEAQSRATAILQRANMVANPAWRSL

SEQ ID NO: 200 - protein, 473 aa, Artificial Sequence
  Description of Artificial Sequence: Synthetic peptide
MQTLSIQHGTLVTMDQYRRVLGDSWVHVQDGRIVALGVHAESVPPPADRVIDARGKVVLPGFINAHTHVNQILLRGGPSHGRQFYDWLFNVLYPGQKAMRPEVAVAVRLYCAEAVRSGITTINEEADSAIYPGNIEAAMAVYGEVGVRVVYARMFFDRMDGRIQGYVDALKARSPQVELCSIMEETAVAKDRITALSDQYHGTAGGRISVWPAPATTTPVTVEGMRWAQAFARDRAVMWTLHMAESDHDERIIGWSPAEYMECYGLLDERLQVAHCVYFDRKDVRLLHRHNVKVASQVVSNAYLGSGVAPVPEMVERGMAVGIGTDNNNSSDSVNMIGDMKFMAHIHRAVHRDADVLTPEKILEMATIDGARSLGMDHEIGSIETGKRADLILLDLRHPQTTPHHHLAATIVFQAYGNEVDTVLIDGNVVMENRRLSFLPPERELAFLEEAQSRATAILQRANMVANPAWRSL

SEQ ID NO: 201 - protein, 473 aa, Artificial Sequence
  Description of Artificial Sequence: Synthetic peptide
MQTLSIQHGTLVTMDQYRRVLGDSWVHVQDGRIVALGVHAESVPPPADRVIDARGKVVLPGFINAHTHVNQILLRGGPSHGRQFYDWLFNVLYPGQKAMRPEVAVAVRLYCAEAVRSGITTINEEADSAIYPGNIEAAMAVYGEVGVRVVYARMFFDRMDGRIQGYVDALKARSPQVELCSIMEETAVAKDRITALSDQYHGTAGGRISVWPAPATTTPVTVEGMRWAQAFARDRAVMWTLHMAESDHDERILGGSPAEYMECYGLLDERLQVAHCVYFDRKDVRLLHRHNVKVASQVVSNAYLGSGVAPVPEMVERGMAVGIGTDNDNSCDSVNMIGDMKFMAHIHRAVHRDADVLTPEKILEMATIDGARSLGMDHEIGSIETGKRADLILLDLRHPQTTPHHHLAATIVFQAYGNEVDTVLIDGNVVMENRRLSFLPPERELAFLEEAQSRATAILQRANMVANPAWRSL

SEQ ID NO: 202 - protein, 473 aa, Artificial Sequence
  Description of Artificial Sequence: Synthetic peptide
MQTLSIQHGTLVTMDQYRRVLGDSWVHVQDGRIVALGVHAESVPPPADRVIDARGKVVLPGFINAHTHVNQILLRGGPSHGRQFYDWLFNVLYPGQKAMRPEVAVAVRLYCAEAVRSGITTINEEADSAIYPGNIEAAMAVYGEVGVRVVYARMFFDRMDGRIQGYVDALKARSPQVELCSIMEETAVAKDRITALSDQYHGTAGGRISVWPAPATTTPVTVEGMRWAQAFARDRAVMWTLHMAESDHDERILGGSPAEYMECYGLLDERLQVAHCVYFDRKDVRLLHRHNVKVASQVVSNAYLGSGVAPVPEMVERGMAVGIGTDNDNSSDSVNMIGDMKFMAHIHRAVHRDADVLTPEKILEMATIDGARSLGMDHEIGSIETGKRADLILLDLRHPQTTPHHHLAATIVFQAYGNEVDTVLIDGNVVMENRRLSFLPPERELAFLEEAQSRATAILQRANMVANPAWRSL

SEQ ID NO: 203 - protein, 473 aa, Artificial Sequence
  Description of Artificial Sequence: Synthetic peptide
MQTLSIQHGTLVTMDQYRRVLGDSWVHVQDGRIVALGVHAESVPPPADRVIDARGKVVLPGFINAHTHVNQILLRGGPSHGRQFYDWLFNVLYPGQKAMRPEVAVAVRLYCAEAVRSGITTINEEADSAIYPGNIEAAMAVYGEVGVRVVYARMFFDRMDGRIQGYVDALKARSPQVELCSIMEETAVAKDRITALSDQYHGTAGGRISVWPAPATTTPVTVEGMRWAQAFARDRAVMWTLHMAESDHDERILGGSPAEYMECYGLLDERLQVAHCVYFDRKDVRLLHRHNVKVASQVVSNAYLGSGVAPVPEMVERGMAVGIGTDNNNSCDSVNMIGDMKFMAHIHRAVHRDADVLTPEKILEMATIDGARSLGMDHEIGSIETGKRADLILLDLRHPQTTPHHHLAATIVFQAYGNEVDTVLIDGNVVMENRRLSFLPPERELAFLEEAQSRATAILQRANMVANPAWRSL

SEQ ID NO: 204 - protein, 473 aa, Artificial Sequence
  Description of Artificial Sequence: Synthetic peptide
MQTLSIQHGTLVTMDQYRRVLGDSWVHVQDGRIVALGVHAESVPPPADRVIDARGKVVLPGFINAHTHVNQILLRGGPSHGRQFYDWLFNVLYPGQKAMRPEVAVAVRLYCAEAVRSGITTINEEADSAIYPGNIEAAMAVYGEVGVRVVYARMFFDRMDGRIQGYVDALKARSPQVELCSIMEETAVAKDRITALSDQYHGTAGGRISVWPAPATTTPVTVEGMRWAQAFARDRAVMWTLHMAESDHDERILGGSPAEYMECYGLLDERLQVAHCVYFDRKDVRLLHRHNVKVASQVVSNAYLGSGVAPVPEMVERGMAVGIGTDNNNSSDSVNMIGDMKFMAHIHRAVHRDADVLTPEKILEMATIDGARSLGMDHEIGSIETGKRADLILLDLRHPQTTPHHHLAATIVFQAYGNEVDTVLIDGNVVMENRRLSFLPPERELAFLEEAQSRATAILQRANMVANPAWRSL

SEQ ID NO: 205 - protein, 473 aa, Artificial Sequence
  Description of Artificial Sequence: Synthetic peptide
MQTLSIQHGTLVTMDQYRRVLGDSWVHVQDGRIVALGVHAESVPPPADRVIDARGKVVLPGFINAHTHVNQILLRGGPSHGRQFYDWLFNVLYPGQKAMRPEVAVAVRLYCAEAVRSGITTINEEADSAIYPGNIEAAMAVYGEVGVRVVYARMFFDRMDGRIQGYVDALKARSPQVELCSIMEETAVAKDRITALSDQYHGTAGGRISVWPAPATTTPVTVEGMRWAQAFARDRAVMWTLHMAESDHDERILGWSPAEYMECYGLLDERLQVAHCVYFDRKDVRLLHRHNVKVASQVVSNAYLGSGVAPVPEMVERGMAVGIGTDNDNSCDSVNMIGDMKFMAHIHRAVHRDADVLTPEKILEMATIDGARSLGMDHEIGSIETGKRADLILLDLRHPQTTPHHHLAATIVFQAYGNEVDTVLIDGNVVMENRRLSFLPPERELAFLEEAQSRATAILQRANMVANPAWRSL

SEQ ID NO: 206 - protein, 473 aa, Artificial Sequence
  Description of Artificial Sequence: Synthetic peptide
MQTLSIQHGTLVTMDQYRRVLGDSWVHVQDGRIVALGVHAESVPPPADRVIDARGKVVLPGFINAHTHVNQILLRGGPSHGRQFYDWLFNVLYPGQKAMRPEVAVAVRLYCAEAVRSGITTINEEADSAIYPGNIEAAMAVYGEVGVRVVYARMFFDRMDGRIQGYVDALKARSPQVELCSIMEETAVAKDRITALSDQYHGTAGGRISVWPAPATTTPVTVEGMRWAQAFARDRAVMWTLHMAESDHDERILGWSPAEYMECYGLLDERLQVAHCVYFDRKDVRLLHRHNVKVASQVVSNAYLGSGVAPVPEMVERGMAVGIGTDNDNSSDSVNMIGDMKFMAHIHRAVHRDADVLTPEKILEMATIDGARSLGMDHEIGSIETGKRADLILLDLRHPQTTPHHHLAATIVFQAYGNEVDTVLIDGNVVMENRRLSFLPPERELAFLEEAQSRATAILQRANMVANPAWRSL

SEQ ID NO: 207 - protein, 473 aa, Artificial Sequence
  Description of Artificial Sequence: Synthetic peptide
MQTLSIQHGTLVTMDQYRRVLGDSWVHVQDGRIVALGVHAESVPPPADRVIDARGKVVLPGFINAHTHVNQILLRGGPSHGRQFYDWLFNVLYPGQKAMRPEVAVAVRLYCAEAVRSGITTINEEADSAIYPGNIEAAMAVYGEVGVRVVYARMFFDRMDGRIQGYVDALKARSPQVELCSIMEETAVAKDRITALSDQYHGTAGGRISVWPAPATTTPVTVEGMRWAQAFARDRAVMWTLHMAESDHDERILGWSPAEYMECYGLLDERLQVAHCVYFDRKDVRLLHRHNVKVASQVVSNAYLGSGVAPVPEMVERGMAVGIGTDNNNSCDSVNMIGDMKFMAHIHRAVHRDADVLTPEKILEMATIDGARSLGMDHEIGSIETGKRADLILLDLRHPQTTPHHHLAATIVFQAYGNEVDTVLIDGNVVMENRRLSFLPPERELAFLEEAQSRATAILQRANMVANPAWRSL

SEQ ID NO: 208 - protein, 473 aa, Artificial Sequence
  Description of Artificial Sequence: Synthetic peptide
MQTLSIQHGTLVTMDQYRRVLGDSWVHVQDGRIVALGVHAESVPPPADRVIDARGKVVLPGFINAHTHVNQILLRGGPSHGRQFYDWLFNVLYPGQKAMRPEVAVAVRLYCAEAVRSGITTINEEADSAIYPGNIEAAMAVYGEVGVRVVYARMFFDRMDGRIQGYVDALKARSPQVELCSIMEETAVAKDRITALSDQYHGTAGGRISVWPAPATTTPVTVEGMRWAQAFARDRAVMWTLHMAESDHDERILGWSPAEYMECYGLLDERLQVAHCVYFDRKDVRLLHRHNVKVASQVVSNAYLGSGVAPVPEMVERGMAVGIGTDNNNSSDSVNMIGDMKFMAHIHRAVHRDADVLTPEKILEMATIDGARSLGMDHEIGSIETGKRADLILLDLRHPQTTPHHHLAATIVFQAYGNEVDTVLIDGNVVMENRRLSFLPPERELAFLEEAQSRATAILQRANMVANPAWRSL

SEQ ID NO: 209 - protein, 473 aa, Artificial Sequence
  Description of Artificial Sequence: Synthetic peptide
MQTLSIQHGTLVTMDQYRRVLGDSWVHVQDGRIVALGVHAESVPPPADRVIDARGKVVLPGFINAHTHVNQILLRGGPSHGRQFYDWLFNVLYPGQKAMRPEVAVAVRLYCAEAVRSGITTINEEADSAIYPGNIEAAMAVYGEVGVRVVYARMFFDRMDGRIQGYVDALKARSPQVELCSIMEETAVAKDRITALSDQYHGTAGGRISVWPAPATTTTVTVEGMRWAQAFARDRAVMWTLHMAESDHDERIIGGSPAEYMECYGLLDERLQVAHCVYFDRKDVRLLHRHNVKVASQVVSNAYLGSGVAPVPEMVERGMAVGIGTDNDNSCDSVNMIGDMKFMAHIHRAVHRDADVLTPEKILEMATIDGARSLGMDHEIGSIETGKRADLILLDLRHPQTTPHHHLAATIVFQAYGNEVDTVLIDGNVVMENRRLSFLPPERELAFLEEAQSRATAILQRANMVANPAWRSL

SEQ ID NO: 210 - protein, 473 aa, Artificial Sequence
  Description of Artificial Sequence: Synthetic peptide
MQTLSIQHGTLVTMDQYRRVLGDSWVHVQDGRIVALGVHAESVPPPADRVIDARGKVVLPGFINAHTHVNQILLRGGPSHGRQFYDWLFNVLYPGQKAMRPEVAVAVRLYCAEAVRSGITTINEEADSAIYPGNIEAAMAVYGEVGVRVVYARMFFDRMDGRIQGYVDALKARSPQVELCSIMEETAVAKDRITALSDQYHGTAGGRISVWPAPATTTTVTVEGMRWAQAFARDRAVMWTLHMAESDHDERIIGGSPAEYMECYGLLDERLQVAHCVYFDRKDVRLLHRHNVKVASQVVSNAYLGSGVAPVPEMVERGMAVGIGTDNDNSSDSVNMIGDMKFMAHIHRAVHRDADVLTPEKILEMATIDGARSLGMDHEIGSIETGKRADLILLDLRHPQTTPHHHLAATIVFQAYGNEVDTVLIDGNVVMENRRLSFLPPERELAFLEEAQSRATAILQRANMVANPAWRSL

SEQ ID NO: 211 - protein, 473 aa, Artificial Sequence
  Description of Artificial Sequence: Synthetic peptide
MQTLSIQHGTLVTMDQYRRVLGDSWVHVQDGRIVALGVHAESVPPPADRVIDARGKVVLPGFINAHTHVNQILLRGGPSHGRQFYDWLFNVLYPGQKAMRPEVAVAVRLYCAEAVRSGITTINEEADSAIYPGNIEAAMAVYGEVGVRVVYARMFFDRMDGRIQGYVDALKARSPQVELCSIMEETAVAKDRITALSDQYHGTAGGRISVWPAPATTTTVTVEGMRWAQAFARDRAVMWTLHMAESDHDERIIGGSPAEYMECYGLLDERLQVAHCVYFDRKDVRLLHRHNVKVASQVVSNAYLGSGVAPVPEMVERGMAVGIGTDNNNSCDSVNMIGDMKFMAHIHRAVHRDADVLTPEKILEMATIDGARSLGMDHEIGSIETGKRADLILLDLRHPQTTPHHHLAATIVFQAYGNEVDTVLIDGNVVMENRRLSFLPPERELAFLEEAQSRATAILQRANMVANPAWRSL

SEQ ID NO: 212 - protein, 473 aa, Artificial Sequence
  Description of Artificial Sequence: Synthetic peptide
MQTLSIQHGTLVTMDQYRRVLGDSWVHVQDGRIVALGVHAESVPPPADRVIDARGKVVLPGFINAHTHVNQILLRGGPSHGRQFYDWLFNVLYPGQKAMRPEVAVAVRLYCAEAVRSGITTINEEADSAIYPGNIEAAMAVYGEVGVRVVYARMFFDRMDGRIQGYVDALKARSPQVELCSIMEETAVAKDRITALSDQYHGTAGGRISVWPAPATTTTVTVEGMRWAQAFARDRAVMWTLHMAESDHDERIIGGSPAEYMECYGLLDERLQVAHCVYFDRKDVRLLHRHNVKVASQVVSNAYLGSGVAPVPEMVERGMAVGIGTDNNNSSDSVNMIGDMKFMAHIHRAVHRDADVLTPEKILEMATIDGARSLGMDHEIGSIETGKRADLILLDLRHPQTTPHHHLAATIVFQAYGNEVDTVLIDGNVVMENRRLSFLPPERELAFLEEAQSRATAILQRANMVANPAWRSL

SEQ ID NO: 213 - protein, 473 aa, Artificial Sequence
  Description of Artificial Sequence: Synthetic peptide
MQTLSIQHGTLVTMDQYRRVLGDSWVHVQDGRIVALGVHAESVPPPADRVIDARGKVVLPGFINAHTHVNQILLRGGPSHGRQFYDWLFNVLYPGQKAMRPEVAVAVRLYCAEAVRSGITTINEEADSAIYPGNIEAAMAVYGEVGVRVVYARMFFDRMDGRIQGYVDALKARSPQVELCSIMEETAVAKDRITALSDQYHGTAGGRISVWPAPATTTTVTVEGMRWAQAFARDRAVMWTLHMAESDHDERIIGWSPAEYMECYGLLDERLQVAHCVYFDRKDVRLLHRHNVKVASQVVSNAYLGSGVAPVPEMVERGMAVGIGTDNDNSCDSVNMIGDMKFMAHIHRAVHRDADVLTPEKILEMATIDGARSLGMDHEIGSIETGKRADLILLDLRHPQTTPHHHLAATIVFQAYGNEVDTVLIDGNVVMENRRLSFLPPERELAFLEEAQSRATAILQRANMVANPAWRSL

SEQ ID NO: 214 - protein, 473 aa, Artificial Sequence
  Description of Artificial Sequence: Synthetic peptide
MQTLSIQHGTLVTMDQYRRVLGDSWVHVQDGRIVALGVHAESVPPPADRVIDARGKVVLPGFINAHTHVNQILLRGGPSHGRQFYDWLFNVLYPGQKAMRPEVAVAVRLYCAEAVRSGITTINEEADSAIYPGNIEAAMAVYGEVGVRVVYARMFFDRMDGRIQGYVDALKARSPQVELCSIMEETAVAKDRITALSDQYHGTAGGRISVWPAPATTTTVTVEGMRWAQAFARDRAVMWTLHMAESDHDERIIGWSPAEYMECYGLLDERLQVAHCVYFDRKDVRLLHRHNVKVASQVVSNAYLGSGVAPVPEMVERGMAVGIGTDNDNSSDSVNMIGDMKFMAHIHRAVHRDADVLTPEKILEMATIDGARSLGMDHEIGSIETGKRADLILLDLRHPQTTPHHHLAATIVFQAYGNEVDTVLIDGNVVMENRRLSFLPPERELAFLEEAQSRATAILQRANMVANPAWRSL

SEQ ID NO: 215 - protein, 473 aa, Artificial Sequence
  Description of Artificial Sequence: Synthetic peptide
MQTLSIQHGTLVTMDQYRRVLGDSWVHVQDGRIVALGVHAESVPPPADRVIDARGKVVLPGFINAHTHVNQILLRGGPSHGRQFYDWLFNVLYPGQKAMRPEVAVAVRLYCAEAVRSGITTINEEADSAIYPGNIEAAMAVYGEVGVRVVYARMFFDRMDGRIQGYVDALKARSPQVELCSIMEETAVAKDRITALSDQYHGTAGGRISVWPAPATTTTVTVEGMRWAQAFARDRAVMWTLHMAESDHDERIIGWSPAEYMECYGLLDERLQVAHCVYFDRKDVRLLHRHNVKVASQVVSNAYLGSGVAPVPEMVERGMAVGIGTDNNNSCDSVNMIGDMKFMAHIHRAVHRDADVLTPEKILEMATIDGARSLGMDHEIGSIETGKRADLILLDLRHPQTTPHHHLAATIVFQAYGNEVDTVLIDGNVVMENRRLSFLPPERELAFLEEAQSRATAILQRANMVANPAWRSL

SEQ ID NO: 216 - protein, 473 aa, Artificial Sequence
  Description of Artificial Sequence: Synthetic peptide
MQTLSIQHGTLVTMDQYRRVLGDSWVHVQDGRIVALGVHAESVPPPADRVIDARGKVVLPGFINAHTHVNQILLRGGPSHGRQFYDWLFNVLYPGQKAMRPEVAVAVRLYCAEAVRSGITTINEEADSAIYPGNIEAAMAVYGEVGVRVVYARMFFDRMDGRIQGYVDALKARSPQVELCSIMEETAVAKDRITALSDQYHGTAGGRISVWPAPATTTTVTVEGMRWAQAFARDRAVMWTLHMAESDHDERIIGWSPAEYMECYGLLDERLQVAHCVYFDRKDVRLLHRHNVKVASQVVSNAYLGSGVAPVPEMVERGMAVGIGTDNNNSSDSVNMIGDMKFMAHIHRAVHRDADVLTPEKILEMATIDGARSLGMDHEIGSIETGKRADLILLDLRHPQTTPHHHLAATIVFQAYGNEVDTVLIDGNVVMENRRLSFLPPERELAFLEEAQSRATAILQRANMVANPAWRSL

SEQ ID NO: 217 - protein, 473 aa, Artificial Sequence
  Description of Artificial Sequence: Synthetic peptide
MQTLSIQHGTLVTMDQYRRVLGDSWVHVQDGRIVALGVHAESVPPPADRVIDARGKVVLPGFINAHTHVNQILLRGGPSHGRQFYDWLFNVLYPGQKAMRPEVAVAVRLYCAEAVRSGITTINEEADSAIYPGNIEAAMAVYGEVGVRVVYARMFFDRMDGRIQGYVDALKARSPQVELCSIMEETAVAKDRITALSDQYHGTAGGRISVWPAPATTTTVTVEGMRWAQAFARDRAVMWTLHMAESDHDERILGGSPAEYMECYGLLDERLQVAHCVYFDRKDVRLLHRHNVKVASQVVSNAYLGSGVAPVPEMVERGMAVGIGTDNDNSCDSVNMIGDMKFMAHIHRAVHRDADVLTPEKILEMATIDGARSLGMDHEIGSIETGKRADLILLDLRHPQTTPHHHLAATIVFQAYGNEVDTVLIDGNVVMENRRLSFLPPERELAFLEEAQSRATAILQRANMVANPAWRSL

SEQ ID NO: 218 - protein, 473 aa, Artificial Sequence
  Description of Artificial Sequence: Synthetic peptide
MQTLSIQHGTLVTMDQYRRVLGDSWVHVQDGRIVALGVHAESVPPPADRVIDARGKVVLPGFINAHTHVNQILLRGGPSHGRQFYDWLFNVLYPGQKAMRPEVAVAVRLYCAEAVRSGITTINEEADSAIYPGNIEAAMAVYGEVGVRVVYARMFFDRMDGRIQGYVDALKARSPQVELCSIMEETAVAKDRITALSDQYHGTAGGRISVWPAPATTTTVTVEGMRWAQAFARDRAVMWTLHMAESDHDERILGGSPAEYMECYGLLDERLQVAHCVYFDRKDVRLLHRHNVKVASQVVSNAYLGSGVAPVPEMVERGMAVGIGTDNDNSSDSVNMIGDMKFMAHIHRAVHRDADVLTPEKILEMATIDGARSLGMDHEIGSIETGKRADLILLDLRHPQTTPHHHLAATIVFQAYGNEVDTVLIDGNVVMENRRLSFLPPERELAFLEEAQSRATAILQRANMVANPAWRSL

SEQ ID NO: 219 - protein, 473 aa, Artificial Sequence
  Description of Artificial Sequence: Synthetic peptide
MQTLSIQHGTLVTMDQYRRVLGDSWVHVQDGRIVALGVHAESVPPPADRVIDARGKVVLPGFINAHTHVNQILLRGGPSHGRQFYDWLFNVLYPGQKAMRPEVAVAVRLYCAEAVRSGITTINEEADSAIYPGNIEAAMAVYGEVGVRVVYARMFFDRMDGRIQGYVDALKARSPQVELCSIMEETAVAKDRITALSDQYHGTAGGRISVWPAPATTTTVTVEGMRWAQAFARDRAVMWTLHMAESDHDERILGGSPAEYMECYGLLDERLQVAHCVYFDRKDVRLLHRHNVKVASQVVSNAYLGSGVAPVPEMVERGMAVGIGTDNNNSCDSVNMIGDMKFMAHIHRAVHRDADVLTPEKILEMATIDGARSLGMDHEIGSIETGKRADLILLDLRHPQTTPHHHLAATIVFQAYGNEVDTVLIDGNVVMENRRLSFLPPERELAFLEEAQSRATAILQRANMVANPAWRSL

SEQ ID NO: 220 - protein, 473 aa, Artificial Sequence
  Description of Artificial Sequence: Synthetic peptide
MQTLSIQHGTLVTMDQYRRVLGDSWVHVQDGRIVALGVHAESVPPPADRVIDARGKVVLPGFINAHTHVNQILLRGGPSHGRQFYDWLFNVLYPGQKAMRPEVAVAVRLYCAEAVRSGITTINEEADSAIYPGNIEAAMAVYGEVGVRVVYARMFFDRMDGRIQGYVDALKARSPQVELCSIMEETAVAKDRITALSDQYHGTAGGRISVWPAPATTTTVTVEGMRWAQAFARDRAVMWTLHMAESDHDERILGGSPAEYMECYGLLDERLQVAHCVYFDRKDVRLLHRHNVKVASQVVSNAYLGSGVAPVPEMVERGMAVGIGTDNNNSSDSVNMIGDMKFMAHIHRAVHRDADVLTPEKILEMATIDGARSLGMDHEIGSIETGKRADLILLDLRHPQTTPHHHLAATIVFQAYGNEVDTVLIDGNVVMENRRLSFLPPERELAFLEEAQSRATAILQRANMVANPAWRSL

SEQ ID NO: 221 - protein, 473 aa, Artificial Sequence
  Description of Artificial Sequence: Synthetic peptide
MQTLSIQHGTLVTMDQYRRVLGDSWVHVQDGRIVALGVHAESVPPPADRVIDARGKVVLPGFINAHTHVNQILLRGGPSHGRQFYDWLFNVLYPGQKAMRPEVAVAVRLYCAEAVRSGITTINEEADSAIYPGNIEAAMAVYGEVGVRVVYARMFFDRMDGRIQGYVDALKARSPQVELCSIMEETAVAKDRITALSDQYHGTAGGRISVWPAPATTTTVTVEGMRWAQAFARDRAVMWTLHMAESDHDERILGWSPAEYMECYGLLDERLQVAHCVYFDRKDVRLLHRHNVKVASQVVSNAYLGSGVAPVPEMVERGMAVGIGTDNDNSCDSVNMIGDMKFMAHIHRAVHRDADVLTPEKILEMATIDGARSLGMDHEIGSIETGKRADLILLDLRHPQTTPHHHLAATIVFQAYGNEVDTVLIDGNVVMENRRLSFLPPERELAFLEEAQSRATAILQRANMVANPAWRSL

SEQ ID NO: 222 - protein, 473 aa, Artificial Sequence
  Description of Artificial Sequence: Synthetic peptide
MQTLSIQHGTLVTMDQYRRVLGDSWVHVQDGRIVALGVHAESVPPPADRVIDARGKVVLPGFINAHTHVNQILLRGGPSHGRQFYDWLFNVLYPGQKAMRPEVAVAVRLYCAEAVRSGITTINEEADSAIYPGNIEAAMAVYGEVGVRVVYARMFFDRMDGRIQGYVDALKARSPQVELCSIMEETAVAKDRITALSDQYHGTAGGRISVWPAPATTTTVTVEGMRWAQAFARDRAVMWTLHMAESDHDERILGWSPAEYMECYGLLDERLQVAHCVYFDRKDVRLLHRHNVKVASQVVSNAYLGSGVAPVPEMVERGMAVGIGTDNDNSSDSVNMIGDMKFMAHIHRAVHRDADVLTPEKILEMATIDGARSLGMDHEIGSIETGKRADLILLDLRHPQTTPHHHLAATIVFQAYGNEVDTVLIDGNVVMENRRLSFLPPERELAFLEEAQSRATAILQRANMVANPAWRSL

SEQ ID NO: 223 - protein, 473 aa, Artificial Sequence
  Description of Artificial Sequence: Synthetic peptide
MQTLSIQHGTLVTMDQYRRVLGDSWVHVQDGRIVALGVHAESVPPPADRVIDARGKVVLPGFINAHTHVNQILLRGGPSHGRQFYDWLFNVLYPGQKAMRPEVAVAVRLYCAEAVRSGITTINEEADSAIYPGNIEAAMAVYGEVGVRVVYARMFFDRMDGRIQGYVDALKARSPQVELCSIMEETAVAKDRITALSDQYHGTAGGRISVWPAPATTTTVTVEGMRWAQAFARDRAVMWTLHMAESDHDERILGWSPAEYMECYGLLDERLQVAHCVYFDRKDVRLLHRHNVKVASQVVSNAYLGSGVAPVPEMVERGMAVGIGTDNNNSCDSVNMIGDMKFMAHIHRAVHRDADVLTPEKILEMATIDGARSLGMDHEIGSIETGKRADLILLDLRHPQTTPHHHLAATIVFQAYGNEVDTVLIDGNVVMENRRLSFLPPERELAFLEEAQSRATAILQRANMVANPAWRSL

SEQ ID NO: 224 - protein, 473 aa, Artificial Sequence
  Description of Artificial Sequence: Synthetic peptide
MQTLSIQHGTLVTMDQYRRVLGDSWVHVQDGRIVALGVHAESVPPPADRVIDARGKVVLPGFINAHTHVNQILLRGGPSHGRQFYDWLFNVLYPGQKAMRPEVAVAVRLYCAEAVRSGITTINEEADSAIYPGNIEAAMAVYGEVGVRVVYARMFFDRMDGRIQGYVDALKARSPQVELCSIMEETAVAKDRITALSDQYHGTAGGRISVWPAPATTTTVTVEGMRWAQAFARDRAVMWTLHMAESDHDERILGWSPAEYMECYGLLDERLQVAHCVYFDRKDVRLLHRHNVKVASQVVSNAYLGSGVAPVPEMVERGMAVGIGTDNNNSSDSVNMIGDMKFMAHIHRAVHRDADVLTPEKILEMATIDGARSLGMDHEIGSIETGKRADLILLDLRHPQTTPHHHLAATIVFQAYGNEVDTVLIDGNVVMENRRLSFLPPERELAFLEEAQSRATAILQRANMVANPAWRSL

SEQ ID NO: 225 - protein, 473 aa, Artificial Sequence
  Description of Artificial Sequence: Synthetic peptide
MQTLSIQHGTLVTMDQYRRVLGDSWVHVQDGRIVALGVHAESVPPPADRVIDARGKVVLPGFINAHTHVNQILLRGGPSHGRQFYDWLFNVVYPGQKAMRPEVAVAVRLYCAEAVRSGITTINEDADSAIYPGNIEAAMAVYGEVGVRVVYARMFFDRMDGRIQGYVDALKARSPQVELCSIMEETAVAKDRITALSDQYHGTAGGRISVWPAPATITPVTVEGMRWAQAFARDRAVMWTLHMAESDHDERIIGGSPAEYMECYGLLDERLQVAHCVYFDRKDVRLLHRHNVKVASQVVSNAYLGSGVAPVPEMVERGMAVGIGTDNDNSCDSVNMIGDMKFMAHIHRAVHRDADVLTPEKILEMATIDGARSLGMDHEIGSIETGKRADLILLDLRHPQTTPHHHLAATIVFQAYGNEVDTVLIDGNVVMENRRLSFLPPERELAFLEEAQSRATAILQRANMVANPAWRSL

SEQ ID NO: 226 - protein, 473 aa, Artificial Sequence
  Description of Artificial Sequence: Synthetic peptide
MQTLSIQHGTLVTMDQYRRVLGDSWVHVQDGRIVALGVHAESVPPPADRVIDARGKVVLPGFINAHTHVNQILLRGGPSHGRQFYDWLFNVVYPGQKAMRPEVAVAVRLYCAEAVRSGITTINEDADSAIYPGNIEAAMAVYGEVGVRVVYARMFFDRMDGRIQGYVDALKARSPQVELCSIMEETAVAKDRITALSDQYHGTAGGRISVWPAPATITPVTVEGMRWAQAFARDRAVMWTLHMAESDHDERIIGGSPAEYMECYGLLDERLQVAHCVYFDRKDVRLLHRHNVKVASQVVSNAYLGSGVAPVPEMVERGMAVGIGTDNDNSSDSVNMIGDMKFMAHIHRAVHRDADVLTPEKILEMATIDGARSLGMDHEIGSIETGKRADLILLDLRHPQTTPHHHLAATIVFQAYGNEVDTVLIDGNVVMENRRLSFLPPERELAFLEEAQSRATAILQRANMVANPAWRSL

SEQ ID NO: 227 - protein, 473 aa, Artificial Sequence
  Description of Artificial Sequence: Synthetic peptide
MQTLSIQHGTLVTMDQYRRVLGDSWVHVQDGRIVALGVHAESVPPPADRVIDARGKVVLPGFINAHTHVNQILLRGGPSHGRQFYDWLFNVVYPGQKAMRPEVAVAVRLYCAEAVRSGITTINEDADSAIYPGNIEAAMAVYGEVGVRVVYARMFFDRMDGRIQGYVDALKARSPQVELCSIMEETAVAKDRITALSDQYHGTAGGRISVWPAPATITPVTVEGMRWAQAFARDRAVMWTLHMAESDHDERIIGGSPAEYMECYGLLDERLQVAHCVYFDRKDVRLLHRHNVKVASQVVSNAYLGSGVAPVPEMVERGMAVGIGTDNNNSCDSVNMIGDMKFMAHIHRAVHRDADVLTPEKILEMATIDGARSLGMDHEIGSIETGKRADLILLDLRHPQTTPHHHLAATIVFQAYGNEVDTVLIDGNVVMENRRLSFLPPERELAFLEEAQSRATAILQRANMVANPAWRSL

SEQ ID NO: 228 - protein, 473 aa, Artificial Sequence
  Description of Artificial Sequence: Synthetic peptide
MQTLSIQHGTLVTMDQYRRVLGDSWVHVQDGRIVALGVHAESVPPPADRVIDARGKVVLPGFINAHTHVNQILLRGGPSHGRQFYDWLFNVVYPGQKAMRPEVAVAVRLYCAEAVRSGITTINEDADSAIYPGNIEAAMAVYGEVGVRVVYARMFFDRMDGRIQGYVDALKARSPQVELCSIMEETAVAKDRITALSDQYHGTAGGRISVWPAPATITPVTVEGMRWAQAFARDRAVMWTLHMAESDHDERIIGGSPAEYMECYGLLDERLQVAHCVYFDRKDVRLLHRHNVKVASQVVSNAYLGSGVAPVPEMVERGMAVGIGTDNNNSSDSVNMIGDMKFMAHIHRAVHRDADVLTPEKILEMATIDGARSLGMDHEIGSIETGKRADLILLDLRHPQTTPHHHLAATIVFQAYGNEVDTVLIDGNVVMENRRLSFLPPERELAFLEEAQSRATAILQRANMVANPAWRSL

SEQ ID NO: 229 - protein, 473 aa, Artificial Sequence
  Description of Artificial Sequence: Synthetic peptide
MQTLSIQHGTLVTMDQYRRVLGDSWVHVQDGRIVALGVHAESVPPPADRVIDARGKVVLPGFINAHTHVNQILLRGGPSHGRQFYDWLFNVVYPGQKAMRPEVAVAVRLYCAEAVRSGITTINEDADSAIYPGNIEAAMAVYGEVGVRVVYARMFFDRMDGRIQGYVDALKARSPQVELCSIMEETAVAKDRITALSDQYHGTAGGRISVWPAPATITPVTVEGMRWAQAFARDRAVMWTLHMAESDHDERIIGWSPAEYMECYGLLDERLQVAHCVYFDRKDVRLLHRHNVKVASQVVSNAYLGSGVAPVPEMVERGMAVGIGTDNDNSCDSVNMIGDMKFMAHIHRAVHRDADVLTPEKILEMATIDGARSLGMDHEIGSIETGKRADLILLDLRHPQTTPHHHLAATIVFQAYGNEVDTVLIDGNVVMENRRLSFLPPERELAFLEEAQSRATAILQRANMVANPAWRSL

SEQ ID NO: 230 - protein, 473 aa, Artificial Sequence
  Description of Artificial Sequence: Synthetic peptide
MQTLSIQHGTLVTMDQYRRVLGDSWVHVQDGRIVALGVHAESVPPPADRVIDARGKVVLPGFINAHTHVNQILLRGGPSHGRQFYDWLFNVVYPGQKAMRPEVAVAVRLYCAEAVRSGITTINEDADSAIYPGNIEAAMAVYGEVGVRVVYARMFFDRMDGRIQGYVDALKARSPQVELCSIMEETAVAKDRITALSDQYHGTAGGRISVWPAPATITPVTVEGMRWAQAFARDRAVMWTLHMAESDHDERIIGWSPAEYMECYGLLDERLQVAHCVYFDRKDVRLLHRHNVKVASQVVSNAYLGSGVAPVPEMVERGMAVGIGTDNDNSSDSVNMIGDMKFMAHIHRAVHRDADVLTPEKILEMATIDGARSLGMDHEIGSIETGKRADLILLDLRHPQTTPHHHLAATIVFQAYGNEVDTVLIDGNVVMENRRLSFLPPERELAFLEEAQSRATAILQRANMVANPAWRSL

SEQ ID NO: 231 - protein, 473 aa, Artificial Sequence
  Description of Artificial Sequence: Synthetic peptide
MQTLSIQHGTLVTMDQYRRVLGDSWVHVQDGRIVALGVHAESVPPPADRVIDARGKVVLPGFINAHTHVNQILLRGGPSHGRQFYDWLFNVVYPGQKAMRPEVAVAVRLYCAEAVRSGITTINEDADSAIYPGNIEAAMAVYGEVGVRVVYARMFFDRMDGRIQGYVDALKARSPQVELCSIMEETAVAKDRITALSDQYHGTAGGRISVWPAPATITPVTVEGMRWAQAFARDRAVMWTLHMAESDHDERIIGWSPAEYMECYGLLDERLQVAHCVYFDRKDVRLLHRHNVKVASQVVSNAYLGSGVAPVPEMVERGMAVGIGTDNNNSCDSVNMIGDMKFMAHIHRAVHRDADVLTPEKILEMATIDGARSLGMDHEIGSIETGKRADLILLDLRHPQTTPHHHLAATIVFQAYGNEVDTVLIDGNVVMENRRLSFLPPERELAFLEEAQSRATAILQRANMVANPAWRSL

SEQ ID NO: 232 - protein, 473 aa, Artificial Sequence
  Description of Artificial Sequence: Synthetic peptide
MQTLSIQHGTLVTMDQYRRVLGDSWVHVQDGRIVALGVHAESVPPPADRVIDARGKVVLPGFINAHTHVNQILLRGGPSHGRQFYDWLFNVVYPGQKAMRPEVAVAVRLYCAEAVRSGITTINEDADSAIYPGNIEAAMAVYGEVGVRVVYARMFFDRMDGRIQGYVDALKARSPQVELCSIMEETAVAKDRITALSDQYHGTAGGRISVWPAPATITPVTVEGMRWAQAFARDRAVMWTLHMAESDHDERIIGWSPAEYMECYGLLDERLQVAHCVYFDRKDVRLLHRHNVKVASQVVSNAYLGSGVAPVPEMVERGMAVGIGTDNNNSSDSVNMIGDMKFMAHIHRAVHRDADVLTPEKILEMATIDGARSLGMDHEIGSIETGKRADLILLDLRHPQTTPHHHLAATIVFQAYGNEVDTVLIDGNVVMENRRLSFLPPERELAFLEEAQSRATAILQRANMVANPAWRSL

SEQ ID NO: 233 - protein, 473 aa, Artificial Sequence
  Description of Artificial Sequence: Synthetic peptide
MQTLSIQHGTLVTMDQYRRVLGDSWVHVQDGRIVALGVHAESVPPPADRVIDARGKVVLPGFINAHTHVNQILLRGGPSHGRQFYDWLFNVVYPGQKAMRPEVAVAVRLYCAEAVRSGITTINEDADSAIYPGNIEAAMAVYGEVGVRVVYARMFFDRMDGRIQGYVDALKARSPQVELCSIMEETAVAKDRITALSDQYHGTAGGRISVWPAPATITPVTVEGMRWAQAFARDRAVMWTLHMAESDHDERILGGSPAEYMECYGLLDERLQVAHCVYFDRKDVRLLHRHNVKVASQVVSNAYLGSGVAPVPEMVERGMAVGIGTDNDNSCDSVNMIGDMKFMAHIHRAVHRDADVLTPEKILEMATIDGARSLGMDHEIGSIETGKRADLILLDLRHPQTTPHHHLAATIVFQAYGNEVDTVLIDGNVVMENRRLSFLPPERELAFLEEAQSRATAILQRANMVANPAWRSL

SEQ ID NO: 234 - protein, 473 aa, Artificial Sequence
  Description of Artificial Sequence: Synthetic peptide
MQTLSIQHGTLVTMDQYRRVLGDSWVHVQDGRIVALGVHAESVPPPADRVIDARGKVVLPGFINAHTHVNQILLRGGPSHGRQFYDWLFNVVYPGQKAMRPEVAVAVRLYCAEAVRSGITTINEDADSAIYPGNIEAAMAVYGEVGVRVVYARMFFDRMDGRIQGYVDALKARSPQVELCSIMEETAVAKDRITALSDQYHGTAGGRISVWPAPATITPVTVEGMRWAQAFARDRAVMWTLHMAESDHDERILGGSPAEYMECYGLLDERLQVAHCVYFDRKDVRLLHRHNVKVASQVVSNAYLGSGVAPVPEMVERGMAVGIGTDNDNSSDSVNMIGDMKFMAHIHRAVHRDADVLTPEKILEMATIDGARSLGMDHEIGSIETGKRADLILLDLRHPQTTPHHHLAATIVFQAYGNEVDTVLIDGNVVMENRRLSFLPPERELAFLEEAQSRATAILQRANMVANPAWRSL

SEQ ID NO: 235 - protein, 473 aa, Artificial Sequence
  Description of Artificial Sequence: Synthetic peptide
MQTLSIQHGTLVTMDQYRRVLGDSWVHVQDGRIVALGVHAESVPPPADRVIDARGKVVLPGFINAHTHVNQILLRGGPSHGRQFYDWLFNVVYPGQKAMRPEVAVAVRLYCAEAVRSGITTINEDADSAIYPGNIEAAMAVYGEVGVRVVYARMFFDRMDGRIQGYVDALKARSPQVELCSIMEETAVAKDRITALSDQYHGTAGGRISVWPAPATITPVTVEGMRWAQAFARDRAVMWTLHMAESDHDERILGGSPAEYMECYGLLDERLQVAHCVYFDRKDVRLLHRHNVKVASQVVSNAYLGSGVAPVPEMVERGMAVGIGTDNNNSCDSVNMIGDMKFMAHIHRAVHRDADVLTPEKILEMATIDGARSLGMDHEIGSIETGKRADLILLDLRHPQTTPHHHLAATIVFQAYGNEVDTVLIDGNVVMENRRLSFLPPERELAFLEEAQSRATAILQRANMVANPAWRSL

SEQ ID NO: 236 - protein, 473 aa, Artificial Sequence
  Description of Artificial Sequence: Synthetic peptide
MQTLSIQHGTLVTMDQYRRVLGDSWVHVQDGRIVALGVHAESVPPPADRVIDARGKVVLPGFINAHTHVNQILLRGGPSHGRQFYDWLFNVVYPGQKAMRPEVAVAVRLYCAEAVRSGITTINEDADSAIYPGNIEAAMAVYGEVGVRVVYARMFFDRMDGRIQGYVDALKARSPQVELCSIMEETAVAKDRITALSDQYHGTAGGRISVWPAPATITPVTVEGMRWAQAFARDRAVMWTLHMAESDHDERILGGSPAEYMECYGLLDERLQVAHCVYFDRKDVRLLHRHNVKVASQVVSNAYLGSGVAPVPEMVERGMAVGIGTDNNNSSDSVNMIGDMKFMAHIHRAVHRDADVLTPEKILEMATIDGARSLGMDHEIGSIETGKRADLILLDLRHPQTTPHHHLAATIVFQAYGNEVDTVLIDGNVVMENRRLSFLPPERELAFLEEAQSRATAILQRANMVANPAWRSL

SEQ ID NO: 237 - protein, 473 aa, Artificial Sequence
  Description of Artificial Sequence: Synthetic peptide
MQTLSIQHGTLVTMDQYRRVLGDSWVHVQDGRIVALGVHAESVPPPADRVIDARGKVVLPGFINAHTHVNQILLRGGPSHGRQFYDWLFNVVYPGQKAMRPEVAVAVRLYCAEAVRSGITTINEDADSAIYPGNIEAAMAVYGEVGVRVVYARMFFDRMDGRIQGYVDALKARSPQVELCSIMEETAVAKDRITALSDQYHGTAGGRISVWPAPATITPVTVEGMRWAQAFARDRAVMWTLHMAESDHDERILGWSPAEYMECYGLLDERLQVAHCVYFDRKDVRLLHRHNVKVASQVVSNAYLGSGVAPVPEMVERGMAVGIGTDNDNSCDSVNMIGDMKFMAHIHRAVHRDADVLTPEKILEMATIDGARSLGMDHEIGSIETGKRADLILLDLRHPQTTPHHHLAATIVFQAYGNEVDTVLIDGNVVMENRRLSFLPPERELAFLEEAQSRATAILQRANMVANPAWRSL

SEQ ID NO: 238 - protein, 473 aa, Artificial Sequence
  Description of Artificial Sequence: Synthetic peptide
MQTLSIQHGTLVTMDQYRRVLGDSWVHVQDGRIVALGVHAESVPPPADRVIDARGKVVLPGFINAHTHVNQILLRGGPSHGRQFYDWLFNVVYPGQKAMRPEVAVAVRLYCAEAVRSGITTINEDADSAIYPGNIEAAMAVYGEVGVRVVYARMFFDRMDGRIQGYVDALKARSPQVELCSIMEETAVAKDRITALSDQYHGTAGGRISVWPAPATITPVTVEGMRWAQAFARDRAVMWTLHMAESDHDERILGWSPAEYMECYGLLDERLQVAHCVYFDRKDVRLLHRHNVKVASQVVSNAYLGSGVAPVPEMVERGMAVGIGTDNDNSSDSVNMIGDMKFMAHIHRAVHRDADVLTPEKILEMATIDGARSLGMDHEIGSIETGKRADLILLDLRHPQTTPHHHLAATIVFQAYGNEVDTVLIDGNVVMENRRLSFLPPERELAFLEEAQSRATAILQRANMVANPAWRSL

SEQ ID NO: 239 - protein, 473 aa, Artificial Sequence
  Description of Artificial Sequence: Synthetic peptide
MQTLSIQHGTLVTMDQYRRVLGDSWVHVQDGRIVALGVHAESVPPPADRVIDARGKVVLPGFINAHTHVNQILLRGGPSHGRQFYDWLFNVVYPGQKAMRPEVAVAVRLYCAEAVRSGITTINEDADSAIYPGNIEAAMAVYGEVGVRVVYARMFFDRMDGRIQGYVDALKARSPQVELCSIMEETAVAKDRITALSDQYHGTAGGRISVWPAPATITPVTVEGMRWAQAFARDRAVMWTLHMAESDHDERILGWSPAEYMECYGLLDERLQVAHCVYFDRKDVRLLHRHNVKVASQVVSNAYLGSGVAPVPEMVERGMAVGIGTDNNNSCDSVNMIGDMKFMAHIHRAVHRDADVLTPEKILEMATIDGARSLGMDHEIGSIETGKRADLILLDLRHPQTTPHHHLAATIVFQAYGNEVDTVLIDGNVVMENRRLSFLPPERELAFLEEAQSRATAILQRANMVANPAWRSL

SEQ ID NO: 240 - protein, 473 aa, Artificial Sequence
  Description of Artificial Sequence: Synthetic peptide
MQTLSIQHGTLVTMDQYRRVLGDSWVHVQDGRIVALGVHAESVPPPADRVIDARGKVVLPGFINAHTHVNQILLRGGPSHGRQFYDWLFNVVYPGQKAMRPEVAVAVRLYCAEAVRSGITTINEDADSAIYPGNIEAAMAVYGEVGVRVVYARMFFDRMDGRIQGYVDALKARSPQVELCSIMEETAVAKDRITALSDQYHGTAGGRISVWPAPATITPVTVEGMRWAQAFARDRAVMWTLHMAESDHDERILGWSPAEYMECYGLLDERLQVAHCVYFDRKDVRLLHRHNVKVASQVVSNAYLGSGVAPVPEMVERGMAVGIGTDNNNSSDSVNMIGDMKFMAHIHRAVHRDADVLTPEKILEMATIDGARSLGMDHEIGSIETGKRADLILLDLRHPQTTPHHHLAATIVFQAYGNEVDTVLIDGNVVMENRRLSFLPPERELAFLEEAQSRATAILQRANMVANPAWRSL

SEQ ID NO: 241 - protein, 473 aa, Artificial Sequence
  Description of Artificial Sequence: Synthetic peptide
MQTLSIQHGTLVTMDQYRRVLGDSWVHVQDGRIVALGVHAESVPPPADRVIDARGKVVLPGFINAHTHVNQILLRGGPSHGRQFYDWLFNVVYPGQKAMRPEVAVAVRLYCAEAVRSGITTINEDADSAIYPGNIEAAMAVYGEVGVRVVYARMFFDRMDGRIQGYVDALKARSPQVELCSIMEETAVAKDRITALSDQYHGTAGGRISVWPAPATITTVTVEGMRWAQAFARDRAVMWTLHMAESDHDERIIGGSPAEYMECYGLLDERLQVAHCVYFDRKDVRLLHRHNVKVASQVVSNAYLGSGVAPVPEMVERGMAVGIGTDNDNSCDSVNMIGDMKFMAHIHRAVHRDADVLTPEKILEMATIDGARSLGMDHEIGSIETGKRADLILLDLRHPQTTPHHHLAATIVFQAYGNEVDTVLIDGNVVMENRRLSFLPPERELAFLEEAQSRATAILQRANMVANPAWRSL

SEQ ID NO: 242 - protein, 473 aa, Artificial Sequence
  Description of Artificial Sequence: Synthetic peptide
MQTLSIQHGTLVTMDQYRRVLGDSWVHVQDGRIVALGVHAESVPPPADRVIDARGKVVLPGFINAHTHVNQILLRGGPSHGRQFYDWLFNVVYPGQKAMRPEVAVAVRLYCAEAVRSGITTINEDADSAIYPGNIEAAMAVYGEVGVRVVYARMFFDRMDGRIQGYVDALKARSPQVELCSIMEETAVAKDRITALSDQYHGTAGGRISVWPAPATITTVTVEGMRWAQAFARDRAVMWTLHMAESDHDERIIGGSPAEYMECYGLLDERLQVAHCVYFDRKDVRLLHRHNVKVASQVVSNAYLGSGVAPVPEMVERGMAVGIGTDNDNSSDSVNMIGDMKFMAHIHRAVHRDADVLTPEKILEMATIDGARSLGMDHEIGSIETGKRADLILLDLRHPQTTPHHHLAATIVFQAYGNEVDTVLIDGNVVMENRRLSFLPPERELAFLEEAQSRATAILQRANMVANPAWRSL

SEQ ID NO: 243 - protein, 473 aa, Artificial Sequence
  Description of Artificial Sequence: Synthetic peptide
MQTLSIQHGTLVTMDQYRRVLGDSWVHVQDGRIVALGVHAESVPPPADRVIDARGKVVLPGFINAHTHVNQILLRGGPSHGRQFYDWLFNVVYPGQKAMRPEVAVAVRLYCAEAVRSGITTINEDADSAIYPGNIEAAMAVYGEVGVRVVYARMFFDRMDGRIQGYVDALKARSPQVELCSIMEETAVAKDRITALSDQYHGTAGGRISVWPAPATITTVTVEGMRWAQAFARDRAVMWTLHMAESDHDERIIGGSPAEYMECYGLLDERLQVAHCVYFDRKDVRLLHRHNVKVASQVVSNAYLGSGVAPVPEMVERGMAVGIGTDNNNSCDSVNMIGDMKFMAHIHRAVHRDADVLTPEKILEMATIDGARSLGMDHEIGSIETGKRADLILLDLRHPQTTPHHHLAATIVFQAYGNEVDTVLIDGNVVMENRRLSFLPPERELAFLEEAQSRATAILQRANMVANPAWRSL

SEQ ID NO: 244 - protein, 473 aa, Artificial Sequence
  Description of Artificial Sequence: Synthetic peptide
MQTLSIQHGTLVTMDQYRRVLGDSWVHVQDGRIVALGVHAESVPPPADRVIDARGKVVLPGFINAHTHVNQILLRGGPSHGRQFYDWLFNVVYPGQKAMRPEVAVAVRLYCAEAVRSGITTINEDADSAIYPGNIEAAMAVYGEVGVRVVYARMFFDRMDGRIQGYVDALKARSPQVELCSIMEETAVAKDRITALSDQYHGTAGGRISVWPAPATITTVTVEGMRWAQAFARDRAVMWTLHMAESDHDERIIGGSPAEYMECYGLLDERLQVAHCVYFDRKDVRLLHRHNVKVASQVVSNAYLGSGVAPVPEMVERGMAVGIGTDNNNSSDSVNMIGDMKFMAHIHRAVHRDADVLTPEKILEMATIDGARSLGMDHEIGSIETGKRADLILLDLRHPQTTPHHHLAATIVFQAYGNEVDTVLIDGNVVMENRRLSFLPPERELAFLEEAQSRATAILQRANMVANPAWRSL

SEQ ID NO: 245 - protein, 473 aa, Artificial Sequence
  Description of Artificial Sequence: Synthetic peptide
MQTLSIQHGTLVTMDQYRRVLGDSWVHVQDGRIVALGVHAESVPPPADRVIDARGKVVLPGFINAHTHVNQILLRGGPSHGRQFYDWLFNVVYPGQKAMRPEVAVAVRLYCAEAVRSGITTINEDADSAIYPGNIEAAMAVYGEVGVRVVYARMFFDRMDGRIQGYVDALKARSPQVELCSIMEETAVAKDRITALSDQYHGTAGGRISVWPAPATITTVTVEGMRWAQAFARDRAVMWTLHMAESDHDERIIGWSPAEYMECYGLLDERLQVAHCVYFDRKDVRLLHRHNVKVASQVVSNAYLGSGVAPVPEMVERGMAVGIGTDNDNSCDSVNMIGDMKFMAHIHRAVHRDADVLTPEKILEMATIDGARSLGMDHEIGSIETGKRADLILLDLRHPQTTPHHHLAATIVFQAYGNEVDTVLIDGNVVMENRRLSFLPPERELAFLEEAQSRATAILQRANMVANPAWRSL

SEQ ID NO: 246 - protein, 473 aa, Artificial Sequence
  Description of Artificial Sequence: Synthetic peptide
MQTLSIQHGTLVTMDQYRRVLGDSWVHVQDGRIVALGVHAESVPPPADRVIDARGKVVLPGFINAHTHVNQILLRGGPSHGRQFYDWLFNVVYPGQKAMRPEVAVAVRLYCAEAVRSGITTINEDADSAIYPGNIEAAMAVYGEVGVRVVYARMFFDRMDGRIQGYVDALKARSPQVELCSIMEETAVAKDRITALSDQYHGTAGGRISVWPAPATITTVTVEGMRWAQAFARDRAVMWTLHMAESDHDERIIGWSPAEYMECYGLLDERLQVAHCVYFDRKDVRLLHRHNVKVASQVVSNAYLGSGVAPVPEMVERGMAVGIGTDNDNSSDSVNMIGDMKFMAHIHRAVHRDADVLTPEKILEMATIDGARSLGMDHEIGSIETGKRADLILLDLRHPQTTPHHHLAATIVFQAYGNEVDTVLIDGNVVMENRRLSFLPPERELAFLEEAQSRATAILQRANMVANPAWRSL

SEQ ID NO: 247 - protein, 473 aa, Artificial Sequence
  Description of Artificial Sequence: Synthetic peptide
MQTLSIQHGTLVTMDQYRRVLGDSWVHVQDGRIVALGVHAESVPPPADRVIDARGKVVLPGFINAHTHVNQILLRGGPSHGRQFYDWLFNVVYPGQKAMRPEVAVAVRLYCAEAVRSGITTINEDADSAIYPGNIEAAMAVYGEVGVRVVYARMFFDRMDGRIQGYVDALKARSPQVELCSIMEETAVAKDRITALSDQYHGTAGGRISVWPAPATITTVTVEGMRWAQAFARDRAVMWTLHMAESDHDERIIGWSPAEYMECYGLLDERLQVAHCVYFDRKDVRLLHRHNVKVASQVVSNAYLGSGVAPVPEMVERGMAVGIGTDNNNSCDSVNMIGDMKFMAHIHRAVHRDADVLTPEKILEMATIDGARSLGMDHEIGSIETGKRADLILLDLRHPQTTPHHHLAATIVFQAYGNEVDTVLIDGNVVMENRRLSFLPPERELAFLEEAQSRATAILQRANMVANPAWRSL

SEQ ID NO: 248 - protein, 473 aa, Artificial Sequence
  Description of Artificial Sequence: Synthetic peptide
MQTLSIQHGTLVTMDQYRRVLGDSWVHVQDGRIVALGVHAESVPPPADRVIDARGKVVLPGFINAHTHVNQILLRGGPSHGRQFYDWLFNVVYPGQKAMRPEVAVAVRLYCAEAVRSGITTINEDADSAIYPGNIEAAMAVYGEVGVRVVYARMFFDRMDGRIQGYVDALKARSPQVELCSIMEETAVAKDRITALSDQYHGTAGGRISVWPAPATITTVTVEGMRWAQAFARDRAVMWTLHMAESDHDERIIGWSPAEYMECYGLLDERLQVAHCVYFDRKDVRLLHRHNVKVASQVVSNAYLGSGVAPVPEMVERGMAVGIGTDNNNSSDSVNMIGDMKFMAHIHRAVHRDADVLTPEKILEMATIDGARSLGMDHEIGSIETGKRADLILLDLRHPQTTPHHHLAATIVFQAYGNEVDTVLIDGNVVMENRRLSFLPPERELAFLEEAQSRATAILQRANMVANPAWRSL

SEQ ID NO: 249 - protein, 473 aa, Artificial Sequence
  Description of Artificial Sequence: Synthetic peptide
MQTLSIQHGTLVTMDQYRRVLGDSWVHVQDGRIVALGVHAESVPPPADRVIDARGKVVLPGFINAHTHVNQILLRGGPSHGRQFYDWLFNVVYPGQKAMRPEVAVAVRLYCAEAVRSGITTINEDADSAIYPGNIEAAMAVYGEVGVRVVYARMFFDRMDGRIQGYVDALKARSPQVELCSIMEETAVAKDRITALSDQYHGTAGGRISVWPAPATITTVTVEGMRWAQAFARDRAVMWTLHMAESDHDERILGGSPAEYMECYGLLDERLQVAHCVYFDRKDVRLLHRHNVKVASQVVSNAYLGSGVAPVPEMVERGMAVGIGTDNDNSCDSVNMIGDMKFMAHIHRAVHRDADVLTPEKILEMATIDGARSLGMDHEIGSIETGKRADLILLDLRHPQTTPHHHLAATIVFQAYGNEVDTVLIDGNVVMENRRLSFLPPERELAFLEEAQSRATAILQRANMVANPAWRSL

SEQ ID NO: 250 - protein, 473 aa, Artificial Sequence
  Description of Artificial Sequence: Synthetic peptide
MQTLSIQHGTLVTMDQYRRVLGDSWVHVQDGRIVALGVHAESVPPPADRVIDARGKVVLPGFINAHTHVNQILLRGGPSHGRQFYDWLFNVVYPGQKAMRPEVAVAVRLYCAEAVRSGITTINEDADSAIYPGNIEAAMAVYGEVGVRVVYARMFFDRMDGRIQGYVDALKARSPQVELCSIMEETAVAKDRITALSDQYHGTAGGRISVWPAPATITTVTVEGMRWAQAFARDRAVMWTLHMAESDHDERILGGSPAEYMECYGLLDERLQVAHCVYFDRKDVRLLHRHNVKVASQVVSNAYLGSGVAPVPEMVERGMAVGIGTDNDNSSDSVNMIGDMKFMAHIHRAVHRDADVLTPEKILEMATIDGARSLGMDHEIGSIETGKRADLILLDLRHPQTTPHHHLAATIVFQAYGNEVDTVLIDGNVVMENRRLSFLPPERELAFLEEAQSRATAILQRANMVANPAWRSL

SEQ ID NO: 251 - protein, 473 aa, Artificial Sequence
  Description of Artificial Sequence: Synthetic peptide
MQTLSIQHGTLVTMDQYRRVLGDSWVHVQDGRIVALGVHAESVPPPADRVIDARGKVVLPGFINAHTHVNQILLRGGPSHGRQFYDWLFNVVYPGQKAMRPEVAVAVRLYCAEAVRSGITTINEDADSAIYPGNIEAAMAVYGEVGVRVVYARMFFDRMDGRIQGYVDALKARSPQVELCSIMEETAVAKDRITALSDQYHGTAGGRISVWPAPATITTVTVEGMRWAQAFARDRAVMWTLHMAESDHDERILGGSPAEYMECYGLLDERLQVAHCVYFDRKDVRLLHRHNVKVASQVVSNAYLGSGVAPVPEMVERGMAVGIGTDNNNSCDSVNMIGDMKFMAHIHRAVHRDADVLTPEKILEMATIDGARSLGMDHEIGSIETGKRADLILLDLRHPQTTPHHHLAATIVFQAYGNEVDTVLIDGNVVMENRRLSFLPPERELAFLEEAQSRATAILQRANMVANPAWRSL

SEQ ID NO: 252 - protein, 473 aa, Artificial Sequence
  Description of Artificial Sequence: Synthetic peptide
MQTLSIQHGTLVTMDQYRRVLGDSWVHVQDGRIVALGVHAESVPPPADRVIDARGKVVLPGFINAHTHVNQILLRGGPSHGRQFYDWLFNVVYPGQKAMRPEVAVAVRLYCAEAVRSGITTINEDADSAIYPGNIEAAMAVYGEVGVRVVYARMFFDRMDGRIQGYVDALKARSPQVELCSIMEETAVAKDRITALSDQYHGTAGGRISVWPAPATITTVTVEGMRWAQAFARDRAVMWTLHMAESDHDERILGGSPAEYMECYGLLDERLQVAHCVYFDRKDVRLLHRHNVKVASQVVSNAYLGSGVAPVPEMVERGMAVGIGTDNNNSSDSVNMIGDMKFMAHIHRAVHRDADVLTPEKILEMATIDGARSLGMDHEIGSIETGKRADLILLDLRHPQTTPHHHLAATIVFQAYGNEVDTVLIDGNVVMENRRLSFLPPERELAFLEEAQSRATAILQRANMVANPAWRSL

SEQ ID NO: 253 - protein, 473 aa, Artificial Sequence
  Description of Artificial Sequence: Synthetic peptide
MQTLSIQHGTLVTMDQYRRVLGDSWVHVQDGRIVALGVHAESVPPPADRVIDARGKVVLPGFINAHTHVNQILLRGGPSHGRQFYDWLFNVVYPGQKAMRPEVAVAVRLYCAEAVRSGITTINEDADSAIYPGNIEAAMAVYGEVGVRVVYARMFFDRMDGRIQGYVDALKARSPQVELCSIMEETAVAKDRITALSDQYHGTAGGRISVWPAPATITTVTVEGMRWAQAFARDRAVMWTLHMAESDHDERILGWSPAEYMECYGLLDERLQVAHCVYFDRKDVRLLHRHNVKVASQVVSNAYLGSGVAPVPEMVERGMAVGIGTDNDNSCDSVNMIGDMKFMAHIHRAVHRDADVLTPEKILEMATIDGARSLGMDHEIGSIETGKRADLILLDLRHPQTTPHHHLAATIVFQAYGNEVDTVLIDGNVVMENRRLSFLPPERELAFLEEAQSRATAILQRANMVANPAWRSL

SEQ ID NO: 254 - protein, 473 aa, Artificial Sequence
  Description of Artificial Sequence: Synthetic peptide
MQTLSIQHGTLVTMDQYRRVLGDSWVHVQDGRIVALGVHAESVPPPADRVIDARGKVVLPGFINAHTHVNQILLRGGPSHGRQFYDWLFNVVYPGQKAMRPEVAVAVRLYCAEAVRSGITTINEDADSAIYPGNIEAAMAVYGEVGVRVVYARMFFDRMDGRIQGYVDALKARSPQVELCSIMEETAVAKDRITALSDQYHGTAGGRISVWPAPATITTVTVEGMRWAQAFARDRAVMWTLHMAESDHDERILGWSPAEYMECYGLLDERLQVAHCVYFDRKDVRLLHRHNVKVASQVVSNAYLGSGVAPVPEMVERGMAVGIGTDNDNSSDSVNMIGDMKFMAHIHRAVHRDADVLTPEKILEMATIDGARSLGMDHEIGSIETGKRADLILLDLRHPQTTPHHHLAATIVFQAYGNEVDTVLIDGNVVMENRRLSFLPPERELAFLEEAQSRATAILQRANMVANPAWRSL

SEQ ID NO: 255 - protein, 473 aa, Artificial Sequence
  Description of Artificial Sequence: Synthetic peptide
MQTLSIQHGTLVTMDQYRRVLGDSWVHVQDGRIVALGVHAESVPPPADRVIDARGKVVLPGFINAHTHVNQILLRGGPSHGRQFYDWLFNVVYPGQKAMRPEVAVAVRLYCAEAVRSGITTINEDADSAIYPGNIEAAMAVYGEVGVRVVYARMFFDRMDGRIQGYVDALKARSPQVELCSIMEETAVAKDRITALSDQYHGTAGGRISVWPAPATITTVTVEGMRWAQAFARDRAVMWTLHMAESDHDERILGWSPAEYMECYGLLDERLQVAHCVYFDRKDVRLLHRHNVKVASQVVSNAYLGSGVAPVPEMVERGMAVGIGTDNNNSCDSVNMIGDMKFMAHIHRAVHRDADVLTPEKILEMATIDGARSLGMDHEIGSIETGKRADLILLDLRHPQTTPHHHLAATIVFQAYGNEVDTVLIDGNVVMENRRLSFLPPERELAFLEEAQSRATAILQRANMVANPAWRSL

SEQ ID NO: 256 - protein, 473 aa, Artificial Sequence
  Description of Artificial Sequence: Synthetic peptide
MQTLSIQHGTLVTMDQYRRVLGDSWVHVQDGRIVALGVHAESVPPPADRVIDARGKVVLPGFINAHTHVNQILLRGGPSHGRQFYDWLFNVVYPGQKAMRPEVAVAVRLYCAEAVRSGITTINEDADSAIYPGNIEAAMAVYGEVGVRVVYARMFFDRMDGRIQGYVDALKARSPQVELCSIMEETAVAKDRITALSDQYHGTAGGRISVWPAPATITTVTVEGMRWAQAFARDRAVMWTLHMAESDHDERILGWSPAEYMECYGLLDERLQVAHCVYFDRKDVRLLHRHNVKVASQVVSNAYLGSGVAPVPEMVERGMAVGIGTDNNNSSDSVNMIGDMKFMAHIHRAVHRDADVLTPEKILEMATIDGARSLGMDHEIGSIETGKRADLILLDLRHPQTTPHHHLAATIVFQAYGNEVDTVLIDGNVVMENRRLSFLPPERELAFLEEAQSRATAILQRANMVANPAWRSL

SEQ ID NO: 257 - protein, 473 aa, Artificial Sequence
  Description of Artificial Sequence: Synthetic peptide
MQTLSIQHGTLVTMDQYRRVLGDSWVHVQDGRIVALGVHAESVPPPADRVIDARGKVVLPGFINAHTHVNQILLRGGPSHGRQFYDWLFNVVYPGQKAMRPEVAVAVRLYCAEAVRSGITTINEDADSAIYPGNIEAAMAVYGEVGVRVVYARMFFDRMDGRIQGYVDALKARSPQVELCSIMEETAVAKDRITALSDQYHGTAGGRISVWPAPATTTPVTVEGMRWAQAFARDRAVMWTLHMAESDHDERIIGGSPAEYMECYGLLDERLQVAHCVYFDRKDVRLLHRHNVKVASQVVSNAYLGSGVAPVPEMVERGMAVGIGTDNDNSCDSVNMIGDMKFMAHIHRAVHRDADVLTPEKILEMATIDGARSLGMDHEIGSIETGKRADLILLDLRHPQTTPHHHLAATIVFQAYGNEVDTVLIDGNVVMENRRLSFLPPERELAFLEEAQSRATAILQRANMVANPAWRSL

SEQ ID NO: 258 - protein, 473 aa, Artificial Sequence
  Description of Artificial Sequence: Synthetic peptide
MQTLSIQHGTLVTMDQYRRVLGDSWVHVQDGRIVALGVHAESVPPPADRVIDARGKVVLPGFINAHTHVNQILLRGGPSHGRQFYDWLFNVVYPGQKAMRPEVAVAVRLYCAEAVRSGITTINEDADSAIYPGNIEAAMAVYGEVGVRVVYARMFFDRMDGRIQGYVDALKARSPQVELCSIMEETAVAKDRITALSDQYHGTAGGRISVWPAPATTTPVTVEGMRWAQAFARDRAVMWTLHMAESDHDERIIGGSPAEYMECYGLLDERLQVAHCVYFDRKDVRLLHRHNVKVASQVVSNAYLGSGVAPVPEMVERGMAVGIGTDNDNSSDSVNMIGDMKFMAHIHRAVHRDADVLTPEKILEMATIDGARSLGMDHEIGSIETGKRADLILLDLRHPQTTPHHHLAATIVFQAYGNEVDTVLIDGNVVMENRRLSFLPPERELAFLEEAQSRATAILQRANMVANPAWRSL

SEQ ID NO: 259 - protein, 473 aa, Artificial Sequence
  Description of Artificial Sequence: Synthetic peptide
MQTLSIQHGTLVTMDQYRRVLGDSWVHVQDGRIVALGVHAESVPPPADRVIDARGKVVLPGFINAHTHVNQILLRGGPSHGRQFYDWLFNVVYPGQKAMRPEVAVAVRLYCAEAVRSGITTINEDADSAIYPGNIEAAMAVYGEVGVRVVYARMFFDRMDGRIQGYVDALKARSPQVELCSIMEETAVAKDRITALSDQYHGTAGGRISVWPAPATTTPVTVEGMRWAQAFARDRAVMWTLHMAESDHDERIIGGSPAEYMECYGLLDERLQVAHCVYFDRKDVRLLHRHNVKVASQVVSNAYLGSGVAPVPEMVERGMAVGIGTDNNNSCDSVNMIGDMKFMAHIHRAVHRDADVLTPEKILEMATIDGARSLGMDHEIGSIETGKRADLILLDLRHPQTTPHHHLAATIVFQAYGNEVDTVLIDGNVVMENRRLSFLPPERELAFLEEAQSRATAILQRANMVANPAWRSL

SEQ ID NO: 260 - protein, 473 aa, Artificial Sequence
  Description of Artificial Sequence: Synthetic peptide
MQTLSIQHGTLVTMDQYRRVLGDSWVHVQDGRIVALGVHAESVPPPADRVIDARGKVVLPGFINAHTHVNQILLRGGPSHGRQFYDWLFNVVYPGQKAMRPEVAVAVRLYCAEAVRSGITTINEDADSAIYPGNIEAAMAVYGEVGVRVVYARMFFDRMDGRIQGYVDALKARSPQVELCSIMEETAVAKDRITALSDQYHGTAGGRISVWPAPATTTPVTVEGMRWAQAFARDRAVMWTLHMAESDHDERIIGGSPAEYMECYGLLDERLQVAHCVYFDRKDVRLLHRHNVKVASQVVSNAYLGSGVAPVPEMVERGMAVGIGTDNNNSSDSVNMIGDMKFMAHIHRAVHRDADVLTPEKILEMATIDGARSLGMDHEIGSIETGKRADLILLDLRHPQTTPHHHLAATIVFQAYGNEVDTVLIDGNVVMENRRLSFLPPERELAFLEEAQSRATAILQRANMVANPAWRSL

SEQ ID NO: 261 - protein, 473 aa, Artificial Sequence
  Description of Artificial Sequence: Synthetic peptide
MQTLSIQHGTLVTMDQYRRVLGDSWVHVQDGRIVALGVHAESVPPPADRVIDARGKVVLPGFINAHTHVNQILLRGGPSHGRQFYDWLFNVVYPGQKAMRPEVAVAVRLYCAEAVRSGITTINEDADSAIYPGNIEAAMAVYGEVGVRVVYARMFFDRMDGRIQGYVDALKARSPQVELCSIMEETAVAKDRITALSDQYHGTAGGRISVWPAPATTTPVTVEGMRWAQAFARDRAVMWTLHMAESDHDERIIGWSPAEYMECYGLLDERLQVAHCVYFDRKDVRLLHRHNVKVASQVVSNAYLGSGVAPVPEMVERGMAVGIGTDNDNSCDSVNMIGDMKFMAHIHRAVHRDADVLTPEKILEMATIDGARSLGMDHEIGSIETGKRADLILLDLRHPQTTPHHHLAATIVFQAYGNEVDTVLIDGNVVMENRRLSFLPPERELAFLEEAQSRATAILQRANMVANPAWRSL

SEQ ID NO: 262 - protein, 473 aa, Artificial Sequence
  Description of Artificial Sequence: Synthetic peptide
MQTLSIQHGTLVTMDQYRRVLGDSWVHVQDGRIVALGVHAESVPPPADRVIDARGKVVLPGFINAHTHVNQILLRGGPSHGRQFYDWLFNVVYPGQKAMRPEVAVAVRLYCAEAVRSGITTINEDADSAIYPGNIEAAMAVYGEVGVRVVYARMFFDRMDGRIQGYVDALKARSPQVELCSIMEETAVAKDRITALSDQYHGTAGGRISVWPAPATTTPVTVEGMRWAQAFARDRAVMWTLHMAESDHDERIIGWSPAEYMECYGLLDERLQVAHCVYFDRKDVRLLHRHNVKVASQVVSNAYLGSGVAPVPEMVERGMAVGIGTDNDNSSDSVNMIGDMKFMAHIHRAVHRDADVLTPEKILEMATIDGARSLGMDHEIGSIETGKRADLILLDLRHPQTTPHHHLAATIVFQAYGNEVDTVLIDGNVVMENRRLSFLPPERELAFLEEAQSRATAILQRANMVANPAWRSL

SEQ ID NO: 263 - protein, 473 aa, Artificial Sequence
  Description of Artificial Sequence: Synthetic peptide
MQTLSIQHGTLVTMDQYRRVLGDSWVHVQDGRIVALGVHAESVPPPADRVIDARGKVVLPGFINAHTHVNQILLRGGPSHGRQFYDWLFNVVYPGQKAMRPEVAVAVRLYCAEAVRSGITTINEDADSAIYPGNIEAAMAVYGEVGVRVVYARMFFDRMDGRIQGYVDALKARSPQVELCSIMEETAVAKDRITALSDQYHGTAGGRISVWPAPATTTPVTVEGMRWAQAFARDRAVMWTLHMAESDHDERIIGWSPAEYMECYGLLDERLQVAHCVYFDRKDVRLLHRHNVKVASQVVSNAYLGSGVAPVPEMVERGMAVGIGTDNNNSCDSVNMIGDMKFMAHIHRAVHRDADVLTPEKILEMATIDGARSLGMDHEIGSIETGKRADLILLDLRHPQTTPHHHLAATIVFQAYGNEVDTVLIDGNVVMENRRLSFLPPERELAFLEEAQSRATAILQRANMVANPAWRSL

SEQ ID NO: 264 - protein, 473 aa, Artificial Sequence
  Description of Artificial Sequence: Synthetic peptide
MQTLSIQHGTLVTMDQYRRVLGDSWVHVQDGRIVALGVHAESVPPPADRVIDARGKVVLPGFINAHTHVNQILLRGGPSHGRQFYDWLFNVVYPGQKAMRPEVAVAVRLYCAEAVRSGITTINEDADSAIYPGNIEAAMAVYGEVGVRVVYARMFFDRMDGRIQGYVDALKARSPQVELCSIMEETAVAKDRITALSDQYHGTAGGRISVWPAPATTTPVTVEGMRWAQAFARDRAVMWTLHMAESDHDERIIGWSPAEYMECYGLLDERLQVAHCVYFDRKDVRLLHRHNVKVASQVVSNAYLGSGVAPVPEMVERGMAVGIGTDNNNSSDSVNMIGDMKFMAHIHRAVHRDADVLTPEKILEMATIDGARSLGMDHEIGSIETGKRADLILLDLRHPQTTPHHHLAATIVFQAYGNEVDTVLIDGNVVMENRRLSFLPPERELAFLEEAQSRATAILQRANMVANPAWRSL

SEQ ID NO: 265 - protein, 473 aa, Artificial Sequence
  Description of Artificial Sequence: Synthetic peptide
MQTLSIQHGTLVTMDQYRRVLGDSWVHVQDGRIVALGVHAESVPPPADRVIDARGKVVLPGFINAHTHVNQILLRGGPSHGRQFYDWLFNVVYPGQKAMRPEVAVAVRLYCAEAVRSGITTINEDADSAIYPGNIEAAMAVYGEVGVRVVYARMFFDRMDGRIQGYVDALKARSPQVELCSIMEETAVAKDRITALSDQYHGTAGGRISVWPAPATTTPVTVEGMRWAQAFARDRAVMWTLHMAESDHDERILGGSPAEYMECYGLLDERLQVAHCVYFDRKDVRLLHRHNVKVASQVVSNAYLGSGVAPVPEMVERGMAVGIGTDNDNSCDSVNMIGDMKFMAHIHRAVHRDADVLTPEKILEMATIDGARSLGMDHEIGSIETGKRADLILLDLRHPQTTPHHHLAATIVFQAYGNEVDTVLIDGNVVMENRRLSFLPPERELAFLEEAQSRATAILQRANMVANPAWRSL

SEQ ID NO: 266 - protein, 473 aa, Artificial Sequence
  Description of Artificial Sequence: Synthetic peptide
MQTLSIQHGTLVTMDQYRRVLGDSWVHVQDGRIVALGVHAESVPPPADRVIDARGKVVLPGFINAHTHVNQILLRGGPSHGRQFYDWLFNVVYPGQKAMRPEVAVAVRLYCAEAVRSGITTINEDADSAIYPGNIEAAMAVYGEVGVRVVYARMFFDRMDGRIQGYVDALKARSPQVELCSIMEETAVAKDRITALSDQYHGTAGGRISVWPAPATTTPVTVEGMRWAQAFARDRAVMWTLHMAESDHDERILGGSPAEYMECYGLLDERLQVAHCVYFDRKDVRLLHRHNVKVASQVVSNAYLGSGVAPVPEMVERGMAVGIGTDNDNSSDSVNMIGDMKFMAHIHRAVHRDADVLTPEKILEMATIDGARSLGMDHEIGSIETGKRADLILLDLRHPQTTPHHHLAATIVFQAYGNEVDTVLIDGNVVMENRRLSFLPPERELAFLEEAQSRATAILQRANMVANPAWRSL

SEQ ID NO: 267 - protein, 473 aa, Artificial Sequence
  Description of Artificial Sequence: Synthetic peptide
MQTLSIQHGTLVTMDQYRRVLGDSWVHVQDGRIVALGVHAESVPPPADRVIDARGKVVLPGFINAHTHVNQILLRGGPSHGRQFYDWLFNVVYPGQKAMRPEVAVAVRLYCAEAVRSGITTINEDADSAIYPGNIEAAMAVYGEVGVRVVYARMFFDRMDGRIQGYVDALKARSPQVELCSIMEETAVAKDRITALSDQYHGTAGGRISVWPAPATTTPVTVEGMRWAQAFARDRAVMWTLHMAESDHDERILGGSPAEYMECYGLLDERLQVAHCVYFDRKDVRLLHRHNVKVASQVVSNAYLGSGVAPVPEMVERGMAVGIGTDNNNSCDSVNMIGDMKFMAHIHRAVHRDADVLTPEKILEMATIDGARSLGMDHEIGSIETGKRADLILLDLRHPQTTPHHHLAATIVFQAYGNEVDTVLIDGNVVMENRRLSFLPPERELAFLEEAQSRATAILQRANMVANPAWRSL

SEQ ID NO: 268 - protein, 473 aa, Artificial Sequence
  Description of Artificial Sequence: Synthetic peptide
MQTLSIQHGTLVTMDQYRRVLGDSWVHVQDGRIVALGVHAESVPPPADRVIDARGKVVLPGFINAHTHVNQILLRGGPSHGRQFYDWLFNVVYPGQKAMRPEVAVAVRLYCAEAVRSGITTINEDADSAIYPGNIEAAMAVYGEVGVRVVYARMFFDRMDGRIQGYVDALKARSPQVELCSIMEETAVAKDRITALSDQYHGTAGGRISVWPAPATTTPVTVEGMRWAQAFARDRAVMWTLHMAESDHDERILGGSPAEYMECYGLLDERLQVAHCVYFDRKDVRLLHRHNVKVASQVVSNAYLGSGVAPVPEMVERGMAVGIGTDNNNSSDSVNMIGDMKFMAHIHRAVHRDADVLTPEKILEMATIDGARSLGMDHEIGSIETGKRADLILLDLRHPQTTPHHHLAATIVFQAYGNEVDTVLIDGNVVMENRRLSFLPPERELAFLEEAQSRATAILQRANMVANPAWRSL

SEQ ID NO: 269 - protein, 473 aa, Artificial Sequence
  Description of Artificial Sequence: Synthetic peptide
MQTLSIQHGTLVTMDQYRRVLGDSWVHVQDGRIVALGVHAESVPPPADRVIDARGKVVLPGFINAHTHVNQILLRGGPSHGRQFYDWLFNVVYPGQKAMRPEVAVAVRLYCAEAVRSGITTINEDADSAIYPGNIEAAMAVYGEVGVRVVYARMFFDRMDGRIQGYVDALKARSPQVELCSIMEETAVAKDRITALSDQYHGTAGGRISVWPAPATTTPVTVEGMRWAQAFARDRAVMWTLHMAESDHDERILGWSPAEYMECYGLLDERLQVAHCVYFDRKDVRLLHRHNVKVASQVVSNAYLGSGVAPVPEMVERGMAVGIGTDNDNSCDSVNMIGDMKFMAHIHRAVHRDADVLTPEKILEMATIDGARSLGMDHEIGSIETGKRADLILLDLRHPQTTPHHHLAATIVFQAYGNEVDTVLIDGNVVMENRRLSFLPPERELAFLEEAQSRATAILQRANMVANPAWRSL

SEQ ID NO: 270 - protein, 473 aa, Artificial Sequence
  Description of Artificial Sequence: Synthetic peptide
MQTLSIQHGTLVTMDQYRRVLGDSWVHVQDGRIVALGVHAESVPPPADRVIDARGKVVLPGFINAHTHVNQILLRGGPSHGRQFYDWLFNVVYPGQKAMRPEVAVAVRLYCAEAVRSGITTINEDADSAIYPGNIEAAMAVYGEVGVRVVYARMFFDRMDGRIQGYVDALKARSPQVELCSIMEETAVAKDRITALSDQYHGTAGGRISVWPAPATTTPVTVEGMRWAQAFARDRAVMWTLHMAESDHDERILGWSPAEYMECYGLLDERLQVAHCVYFDRKDVRLLHRHNVKVASQVVSNAYLGSGVAPVPEMVERGMAVGIGTDNDNSSDSVNMIGDMKFMAHIHRAVHRDADVLTPEKILEMATIDGARSLGMDHEIGSIETGKRADLILLDLRHPQTTPHHHLAATIVFQAYGNEVDTVLIDGNVVMENRRLSFLPPERELAFLEEAQSRATAILQRANMVANPAWRSL

SEQ ID NO: 271 - protein, 473 aa, Artificial Sequence
  Description of Artificial Sequence: Synthetic peptide
MQTLSIQHGTLVTMDQYRRVLGDSWVHVQDGRIVALGVHAESVPPPADRVIDARGKVVLPGFINAHTHVNQILLRGGPSHGRQFYDWLFNVVYPGQKAMRPEVAVAVRLYCAEAVRSGITTINEDADSAIYPGNIEAAMAVYGEVGVRVVYARMFFDRMDGRIQGYVDALKARSPQVELCSIMEETAVAKDRITALSDQYHGTAGGRISVWPAPATTTPVTVEGMRWAQAFARDRAVMWTLHMAESDHDERILGWSPAEYMECYGLLDERLQVAHCVYFDRKDVRLLHRHNVKVASQVVSNAYLGSGVAPVPEMVERGMAVGIGTDNNNSCDSVNMIGDMKFMAHIHRAVHRDADVLTPEKILEMATIDGARSLGMDHEIGSIETGKRADLILLDLRHPQTTPHHHLAATIVFQAYGNEVDTVLIDGNVVMENRRLSFLPPERELAFLEEAQSRATAILQRANMVANPAWRSL

SEQ ID NO: 272 - protein, 473 aa, Artificial Sequence
  Description of Artificial Sequence: Synthetic peptide
MQTLSIQHGTLVTMDQYRRVLGDSWVHVQDGRIVALGVHAESVPPPADRVIDARGKVVLPGFINAHTHVNQILLRGGPSHGRQFYDWLFNVVYPGQKAMRPEVAVAVRLYCAEAVRSGITTINEDADSAIYPGNIEAAMAVYGEVGVRVVYARMFFDRMDGRIQGYVDALKARSPQVELCSIMEETAVAKDRITALSDQYHGTAGGRISVWPAPATTTPVTVEGMRWAQAFARDRAVMWTLHMAESDHDERILGWSPAEYMECYGLLDERLQVAHCVYFDRKDVRLLHRHNVKVASQVVSNAYLGSGVAPVPEMVERGMAVGIGTDNNNSSDSVNMIGDMKFMAHIHRAVHRDADVLTPEKILEMATIDGARSLGMDHEIGSIETGKRADLILLDLRHPQTTPHHHLAATIVFQAYGNEVDTVLIDGNVVMENRRLSFLPPERELAFLEEAQSRATAILQRANMVANPAWRSL

SEQ ID NO: 273 - protein, 473 aa, Artificial Sequence
  Description of Artificial Sequence: Synthetic peptide
MQTLSIQHGTLVTMDQYRRVLGDSWVHVQDGRIVALGVHAESVPPPADRVIDARGKVVLPGFINAHTHVNQILLRGGPSHGRQFYDWLFNVVYPGQKAMRPEVAVAVRLYCAEAVRSGITTINEDADSAIYPGNIEAAMAVYGEVGVRVVYARMFFDRMDGRIQGYVDALKARSPQVELCSIMEETAVAKDRITALSDQYHGTAGGRISVWPAPATTTTVTVEGMRWAQAFARDRAVMWTLHMAESDHDERIIGGSPAEYMECYGLLDERLQVAHCVYFDRKDVRLLHRHNVKVASQVVSNAYLGSGVAPVPEMVERGMAVGIGTDNDNSCDSVNMIGDMKFMAHIHRAVHRDADVLTPEKILEMATIDGARSLGMDHEIGSIETGKRADLILLDLRHPQTTPHHHLAATIVFQAYGNEVDTVLIDGNVVMENRRLSFLPPERELAFLEEAQSRATAILQRANMVANPAWRSL

SEQ ID NO: 274 - protein, 473 aa, Artificial Sequence
  Description of Artificial Sequence: Synthetic peptide
MQTLSIQHGTLVTMDQYRRVLGDSWVHVQDGRIVALGVHAESVPPPADRVIDARGKVVLPGFINAHTHVNQILLRGGPSHGRQFYDWLFNVVYPGQKAMRPEVAVAVRLYCAEAVRSGITTINEDADSAIYPGNIEAAMAVYGEVGVRVVYARMFFDRMDGRIQGYVDALKARSPQVELCSIMEETAVAKDRITALSDQYHGTAGGRISVWPAPATTTTVTVEGMRWAQAFARDRAVMWTLHMAESDHDERIIGGSPAEYMECYGLLDERLQVAHCVYFDRKDVRLLHRHNVKVASQVVSNAYLGSGVAPVPEMVERGMAVGIGTDNDNSSDSVNMIGDMKFMAHIHRAVHRDADVLTPEKILEMATIDGARSLGMDHEIGSIETGKRADLILLDLRHPQTTPHHHLAATIVFQAYGNEVDTVLIDGNVVMENRRLSFLPPERELAFLEEAQSRATAILQRANMVANPAWRSL

SEQ ID NO: 275 - protein, 473 aa, Artificial Sequence
  Description of Artificial Sequence: Synthetic peptide
MQTLSIQHGTLVTMDQYRRVLGDSWVHVQDGRIVALGVHAESVPPPADRVIDARGKVVLPGFINAHTHVNQILLRGGPSHGRQFYDWLFNVVYPGQKAMRPEVAVAVRLYCAEAVRSGITTINEDADSAIYPGNIEAAMAVYGEVGVRVVYARMFFDRMDGRIQGYVDALKARSPQVELCSIMEETAVAKDRITALSDQYHGTAGGRISVWPAPATTTTVTVEGMRWAQAFARDRAVMWTLHMAESDHDERIIGGSPAEYMECYGLLDERLQVAHCVYFDRKDVRLLHRHNVKVASQVVSNAYLGSGVAPVPEMVERGMAVGIGTDNNNSCDSVNMIGDMKFMAHIHRAVHRDADVLTPEKILEMATIDGARSLGMDHEIGSIETGKRADLILLDLRHPQTTPHHHLAATIVFQAYGNEVDTVLIDGNVVMENRRLSFLPPERELAFLEEAQSRATAILQRANMVANPAWRSL

SEQ ID NO: 276 - protein, 473 aa, Artificial Sequence
  Description of Artificial Sequence: Synthetic peptide
MQTLSIQHGTLVTMDQYRRVLGDSWVHVQDGRIVALGVHAESVPPPADRVIDARGKVVLPGFINAHTHVNQILLRGGPSHGRQFYDWLFNVVYPGQKAMRPEVAVAVRLYCAEAVRSGITTINEDADSAIYPGNIEAAMAVYGEVGVRVVYARMFFDRMDGRIQGYVDALKARSPQVELCSIMEETAVAKDRITALSDQYHGTAGGRISVWPAPATTTTVTVEGMRWAQAFARDRAVMWTLHMAESDHDERIIGGSPAEYMECYGLLDERLQVAHCVYFDRKDVRLLHRHNVKVASQVVSNAYLGSGVAPVPEMVERGMAVGIGTDNNNSSDSVNMIGDMKFMAHIHRAVHRDADVLTPEKILEMATIDGARSLGMDHEIGSIETGKRADLILLDLRHPQTTPHHHLAATIVFQAYGNEVDTVLIDGNVVMENRRLSFLPPERELAFLEEAQSRATAILQRANMVANPAWRSL

SEQ ID NO: 277 - protein, 473 aa, Artificial Sequence
  Description of Artificial Sequence: Synthetic peptide
MQTLSIQHGTLVTMDQYRRVLGDSWVHVQDGRIVALGVHAESVPPPADRVIDARGKVVLPGFINAHTHVNQILLRGGPSHGRQFYDWLFNVVYPGQKAMRPEVAVAVRLYCAEAVRSGITTINEDADSAIYPGNIEAAMAVYGEVGVRVVYARMFFDRMDGRIQGYVDALKARSPQVELCSIMEETAVAKDRITALSDQYHGTAGGRISVWPAPATTTTVTVEGMRWAQAFARDRAVMWTLHMAESDHDERIIGWSPAEYMECYGLLDERLQVAHCVYFDRKDVRLLHRHNVKVASQVVSNAYLGSGVAPVPEMVERGMAVGIGTDNDNSCDSVNMIGDMKFMAHIHRAVHRDADVLTPEKILEMATIDGARSLGMDHEIGSIETGKRADLILLDLRHPQTTPHHHLAATIVFQAYGNEVDTVLIDGNVVMENRRLSFLPPERELAFLEEAQSRATAILQRANMVANPAWRSL

SEQ ID NO: 278 - protein, 473 aa, Artificial Sequence
  Description of Artificial Sequence: Synthetic peptide
MQTLSIQHGTLVTMDQYRRVLGDSWVHVQDGRIVALGVHAESVPPPADRVIDARGKVVLPGFINAHTHVNQILLRGGPSHGRQFYDWLFNVVYPGQKAMRPEVAVAVRLYCAEAVRSGITTINEDADSAIYPGNIEAAMAVYGEVGVRVVYARMFFDRMDGRIQGYVDALKARSPQVELCSIMEETAVAKDRITALSDQYHGTAGGRISVWPAPATTTTVTVEGMRWAQAFARDRAVMWTLHMAESDHDERIIGWSPAEYMECYGLLDERLQVAHCVYFDRKDVRLLHRHNVKVASQVVSNAYLGSGVAPVPEMVERGMAVGIGTDNDNSSDSVNMIGDMKFMAHIHRAVHRDADVLTPEKILEMATIDGARSLGMDHEIGSIETGKRADLILLDLRHPQTTPHHHLAATIVFQAYGNEVDTVLIDGNVVMENRRLSFLPPERELAFLEEAQSRATAILQRANMVANPAWRSL

SEQ ID NO: 279 - protein, 473 aa, Artificial Sequence
  Description of Artificial Sequence: Synthetic peptide
MQTLSIQHGTLVTMDQYRRVLGDSWVHVQDGRIVALGVHAESVPPPADRVIDARGKVVLPGFINAHTHVNQILLRGGPSHGRQFYDWLFNVVYPGQKAMRPEVAVAVRLYCAEAVRSGITTINEDADSAIYPGNIEAAMAVYGEVGVRVVYARMFFDRMDGRIQGYVDALKARSPQVELCSIMEETAVAKDRITALSDQYHGTAGGRISVWPAPATTTTVTVEGMRWAQAFARDRAVMWTLHMAESDHDERIIGWSPAEYMECYGLLDERLQVAHCVYFDRKDVRLLHRHNVKVASQVVSNAYLGSGVAPVPEMVERGMAVGIGTDNNNSCDSVNMIGDMKFMAHIHRAVHRDADVLTPEKILEMATIDGARSLGMDHEIGSIETGKRADLILLDLRHPQTTPHHHLAATIVFQAYGNEVDTVLIDGNVVMENRRLSFLPPERELAFLEEAQSRATAILQRANMVANPAWRSL

SEQ ID NO: 280 - protein, 473 aa, Artificial Sequence
  Description of Artificial Sequence: Synthetic peptide
MQTLSIQHGTLVTMDQYRRVLGDSWVHVQDGRIVALGVHAESVPPPADRVIDARGKVVLPGFINAHTHVNQILLRGGPSHGRQFYDWLFNVVYPGQKAMRPEVAVAVRLYCAEAVRSGITTINEDADSAIYPGNIEAAMAVYGEVGVRVVYARMFFDRMDGRIQGYVDALKARSPQVELCSIMEETAVAKDRITALSDQYHGTAGGRISVWPAPATTTTVTVEGMRWAQAFARDRAVMWTLHMAESDHDERIIGWSPAEYMECYGLLDERLQVAHCVYFDRKDVRLLHRHNVKVASQVVSNAYLGSGVAPVPEMVERGMAVGIGTDNNNSSDSVNMIGDMKFMAHIHRAVHRDADVLTPEKILEMATIDGARSLGMDHEIGSIETGKRADLILLDLRHPQTTPHHHLAATIVFQAYGNEVDTVLIDGNVVMENRRLSFLPPERELAFLEEAQSRATAILQRANMVANPAWRSL

SEQ ID NO: 281 - protein, 473 aa, Artificial Sequence
  Description of Artificial Sequence: Synthetic peptide
MQTLSIQHGTLVTMDQYRRVLGDSWVHVQDGRIVALGVHAESVPPPADRVIDARGKVVLPGFINAHTHVNQILLRGGPSHGRQFYDWLFNVVYPGQKAMRPEVAVAVRLYCAEAVRSGITTINEDADSAIYPGNIEAAMAVYGEVGVRVVYARMFFDRMDGRIQGYVDALKARSPQVELCSIMEETAVAKDRITALSDQYHGTAGGRISVWPAPATTTTVTVEGMRWAQAFARDRAVMWTLHMAESDHDERILGGSPAEYMECYGLLDERLQVAHCVYFDRKDVRLLHRHNVKVASQVVSNAYLGSGVAPVPEMVERGMAVGIGTDNDNSCDSVNMIGDMKFMAHIHRAVHRDADVLTPEKILEMATIDGARSLGMDHEIGSIETGKRADLILLDLRHPQTTPHHHLAATIVFQAYGNEVDTVLIDGNVVMENRRLSFLPPERELAFLEEAQSRATAILQRANMVANPAWRSL

SEQ ID NO: 282 - protein, 473 aa, Artificial Sequence
  Description of Artificial Sequence: Synthetic peptide
MQTLSIQHGTLVTMDQYRRVLGDSWVHVQDGRIVALGVHAESVPPPADRVIDARGKVVLPGFINAHTHVNQILLRGGPSHGRQFYDWLFNVVYPGQKAMRPEVAVAVRLYCAEAVRSGITTINEDADSAIYPGNIEAAMAVYGEVGVRVVYARMFFDRMDGRIQGYVDALKARSPQVELCSIMEETAVAKDRITALSDQYHGTAGGRISVWPAPATTTTVTVEGMRWAQAFARDRAVMWTLHMAESDHDERILGGSPAEYMECYGLLDERLQVAHCVYFDRKDVRLLHRHNVKVASQVVSNAYLGSGVAPVPEMVERGMAVGIGTDNDNSSDSVNMIGDMKFMAHIHRAVHRDADVLTPEKILEMATIDGARSLGMDHEIGSIETGKRADLILLDLRHPQTTPHHHLAATIVFQAYGNEVDTVLIDGNVVMENRRLSFLPPERELAFLEEAQSRATAILQRANMVANPAWRSL

SEQ ID NO: 283 - protein, 473 aa, Artificial Sequence
  Description of Artificial Sequence: Synthetic peptide
MQTLSIQHGTLVTMDQYRRVLGDSWVHVQDGRIVALGVHAESVPPPADRVIDARGKVVLPGFINAHTHVNQILLRGGPSHGRQFYDWLFNVVYPGQKAMRPEVAVAVRLYCAEAVRSGITTINEDADSAIYPGNIEAAMAVYGEVGVRVVYARMFFDRMDGRIQGYVDALKARSPQVELCSIMEETAVAKDRITALSDQYHGTAGGRISVWPAPATTTTVTVEGMRWAQAFARDRAVMWTLHMAESDHDERILGGSPAEYMECYGLLDERLQVAHCVYFDRKDVRLLHRHNVKVASQVVSNAYLGSGVAPVPEMVERGMAVGIGTDNNNSCDSVNMIGDMKFMAHIHRAVHRDADVLTPEKILEMATIDGARSLGMDHEIGSIETGKRADLILLDLRHPQTTPHHHLAATIVFQAYGNEVDTVLIDGNVVMENRRLSFLPPERELAFLEEAQSRATAILQRANMVANPAWRSL

SEQ ID NO: 284 - protein, 473 aa, Artificial Sequence
  Description of Artificial Sequence: Synthetic peptide
MQTLSIQHGTLVTMDQYRRVLGDSWVHVQDGRIVALGVHAESVPPPADRVIDARGKVVLPGFINAHTHVNQILLRGGPSHGRQFYDWLFNVVYPGQKAMRPEVAVAVRLYCAEAVRSGITTINEDADSAIYPGNIEAAMAVYGEVGVRVVYARMFFDRMDGRIQGYVDALKARSPQVELCSIMEETAVAKDRITALSDQYHGTAGGRISVWPAPATTTTVTVEGMRWAQAFARDRAVMWTLHMAESDHDERILGGSPAEYMECYGLLDERLQVAHCVYFDRKDVRLLHRHNVKVASQVVSNAYLGSGVAPVPEMVERGMAVGIGTDNNNSSDSVNMIGDMKFMAHIHRAVHRDADVLTPEKILEMATIDGARSLGMDHEIGSIETGKRADLILLDLRHPQTTPHHHLAATIVFQAYGNEVDTVLIDGNVVMENRRLSFLPPERELAFLEEAQSRATAILQRANMVANPAWRSL

SEQ ID NO: 285 - protein, 473 aa, Artificial Sequence
  Description of Artificial Sequence: Synthetic peptide
MQTLSIQHGTLVTMDQYRRVLGDSWVHVQDGRIVALGVHAESVPPPADRVIDARGKVVLPGFINAHTHVNQILLRGGPSHGRQFYDWLFNVVYPGQKAMRPEVAVAVRLYCAEAVRSGITTINEDADSAIYPGNIEAAMAVYGEVGVRVVYARMFFDRMDGRIQGYVDALKARSPQVELCSIMEETAVAKDRITALSDQYHGTAGGRISVWPAPATTTTVTVEGMRWAQAFARDRAVMWTLHMAESDHDERILGWSPAEYMECYGLLDERLQVAHCVYFDRKDVRLLHRHNVKVASQVVSNAYLGSGVAPVPEMVERGMAVGIGTDNDNSCDSVNMIGDMKFMAHIHRAVHRDADVLTPEKILEMATIDGARSLGMDHEIGSIETGKRADLILLDLRHPQTTPHHHLAATIVFQAYGNEVDTVLIDGNVVMENRRLSFLPPERELAFLEEAQSRATAILQRANMVANPAWRSL

SEQ ID NO: 286 - protein, 473 aa, Artificial Sequence
  Description of Artificial Sequence: Synthetic peptide
MQTLSIQHGTLVTMDQYRRVLGDSWVHVQDGRIVALGVHAESVPPPADRVIDARGKVVLPGFINAHTHVNQILLRGGPSHGRQFYDWLFNVVYPGQKAMRPEVAVAVRLYCAEAVRSGITTINEDADSAIYPGNIEAAMAVYGEVGVRVVYARMFFDRMDGRIQGYVDALKARSPQVELCSIMEETAVAKDRITALSDQYHGTAGGRISVWPAPATTTTVTVEGMRWAQAFARDRAVMWTLHMAESDHDERILGWSPAEYMECYGLLDERLQVAHCVYFDRKDVRLLHRHNVKVASQVVSNAYLGSGVAPVPEMVERGMAVGIGTDNDNSSDSVNMIGDMKFMAHIHRAVHRDADVLTPEKILEMATIDGARSLGMDHEIGSIETGKRADLILLDLRHPQTTPHHHLAATIVFQAYGNEVDTVLIDGNVVMENRRLSFLPPERELAFLEEAQSRATAILQRANMVANPAWRSL

SEQ ID NO: 287 - protein, 473 aa, Artificial Sequence
  Description of Artificial Sequence: Synthetic peptide
MQTLSIQHGTLVTMDQYRRVLGDSWVHVQDGRIVALGVHAESVPPPADRVIDARGKVVLPGFINAHTHVNQILLRGGPSHGRQFYDWLFNVVYPGQKAMRPEVAVAVRLYCAEAVRSGITTINEDADSAIYPGNIEAAMAVYGEVGVRVVYARMFFDRMDGRIQGYVDALKARSPQVELCSIMEETAVAKDRITALSDQYHGTAGGRISVWPAPATTTTVTVEGMRWAQAFARDRAVMWTLHMAESDHDERILGWSPAEYMECYGLLDERLQVAHCVYFDRKDVRLLHRHNVKVASQVVSNAYLGSGVAPVPEMVERGMAVGIGTDNNNSCDSVNMIGDMKFMAHIHRAVHRDADVLTPEKILEMATIDGARSLGMDHEIGSIETGKRADLILLDLRHPQTTPHHHLAATIVFQAYGNEVDTVLIDGNVVMENRRLSFLPPERELAFLEEAQSRATAILQRANMVANPAWRSL

SEQ ID NO: 288 - protein, 473 aa, Artificial Sequence
  Description of Artificial Sequence: Synthetic peptide
MQTLSIQHGTLVTMDQYRRVLGDSWVHVQDGRIVALGVHAESVPPPADRVIDARGKVVLPGFINAHTHVNQILLRGGPSHGRQFYDWLFNVVYPGQKAMRPEVAVAVRLYCAEAVRSGITTINEDADSAIYPGNIEAAMAVYGEVGVRVVYARMFFDRMDGRIQGYVDALKARSPQVELCSIMEETAVAKDRITALSDQYHGTAGGRISVWPAPATTTTVTVEGMRWAQAFARDRAVMWTLHMAESDHDERILGWSPAEYMECYGLLDERLQVAHCVYFDRKDVRLLHRHNVKVASQVVSNAYLGSGVAPVPEMVERGMAVGIGTDNNNSSDSVNMIGDMKFMAHIHRAVHRDADVLTPEKILEMATIDGARSLGMDHEIGSIETGKRADLILLDLRHPQTTPHHHLAATIVFQAYGNEVDTVLIDGNVVMENRRLSFLPPERELAFLEEAQSRATAILQRANMVANPAWRSL

SEQ ID NO: 289 - protein, 473 aa, Artificial Sequence
  Description of Artificial Sequence: Synthetic peptide
MQTLSIQHGTLVTMDQYRRVLGDSWVHVQDGRIVALGVHAESVPPPADRVIDARGKVVLPGFINAHTHVNQILLRGGPSHGRQFYDWLFNVVYPGQKAMRPEVAVAVRLYCAEAVRSGITTINEEADSAIYPGNIEAAMAVYGEVGVRVVYARMFFDRMDGRIQGYVDALKARSPQVELCSIMEETAVAKDRITALSDQYHGTAGGRISVWPAPATITPVTVEGMRWAQAFARDRAVMWTLHMAESDHDERIIGGSPAEYMECYGLLDERLQVAHCVYFDRKDVRLLHRHNVKVASQVVSNAYLGSGVAPVPEMVERGMAVGIGTDNDNSCDSVNMIGDMKFMAHIHRAVHRDADVLTPEKILEMATIDGARSLGMDHEIGSIETGKRADLILLDLRHPQTTPHHHLAATIVFQAYGNEVDTVLIDGNVVMENRRLSFLPPERELAFLEEAQSRATAILQRANMVANPAWRSL

SEQ ID NO: 290 - protein, 473 aa, Artificial Sequence
  Description of Artificial Sequence: Synthetic peptide
MQTLSIQHGTLVTMDQYRRVLGDSWVHVQDGRIVALGVHAESVPPPADRVIDARGKVVLPGFINAHTHVNQILLRGGPSHGRQFYDWLFNVVYPGQKAMRPEVAVAVRLYCAEAVRSGITTINEEADSAIYPGNIEAAMAVYGEVGVRVVYARMFFDRMDGRIQGYVDALKARSPQVELCSIMEETAVAKDRITALSDQYHGTAGGRISVWPAPATITPVTVEGMRWAQAFARDRAVMWTLHMAESDHDERIIGGSPAEYMECYGLLDERLQVAHCVYFDRKDVRLLHRHNVKVASQVVSNAYLGSGVAPVPEMVERGMAVGIGTDNDNSSDSVNMIGDMKFMAHIHRAVHRDADVLTPEKILEMATIDGARSLGMDHEIGSIETGKRADLILLDLRHPQTTPHHHLAATIVFQAYGNEVDTVLIDGNVVMENRRLSFLPPERELAFLEEAQSRATAILQRANMVANPAWRSL

SEQ ID NO: 291 - protein, 473 aa, Artificial Sequence
  Description of Artificial Sequence: Synthetic peptide
MQTLSIQHGTLVTMDQYRRVLGDSWVHVQDGRIVALGVHAESVPPPADRVIDARGKVVLPGFINAHTHVNQILLRGGPSHGRQFYDWLFNVVYPGQKAMRPEVAVAVRLYCAEAVRSGITTINEEADSAIYPGNIEAAMAVYGEVGVRVVYARMFFDRMDGRIQGYVDALKARSPQVELCSIMEETAVAKDRITALSDQYHGTAGGRISVWPAPATITPVTVEGMRWAQAFARDRAVMWTLHMAESDHDERIIGGSPAEYMECYGLLDERLQVAHCVYFDRKDVRLLHRHNVKVASQVVSNAYLGSGVAPVPEMVERGMAVGIGTDNNNSCDSVNMIGDMKFMAHIHRAVHRDADVLTPEKILEMATIDGARSLGMDHEIGSIETGKRADLILLDLRHPQTTPHHHLAATIVFQAYGNEVDTVLIDGNVVMENRRLSFLPPERELAFLEEAQSRATAILQRANMVANPAWRSL

SEQ ID NO: 292 - protein, 473 aa, Artificial Sequence
  Description of Artificial Sequence: Synthetic peptide
MQTLSIQHGTLVTMDQYRRVLGDSWVHVQDGRIVALGVHAESVPPPADRVIDARGKVVLPGFINAHTHVNQILLRGGPSHGRQFYDWLFNVVYPGQKAMRPEVAVAVRLYCAEAVRSGITTINEEADSAIYPGNIEAAMAVYGEVGVRVVYARMFFDRMDGRIQGYVDALKARSPQVELCSIMEETAVAKDRITALSDQYHGTAGGRISVWPAPATITPVTVEGMRWAQAFARDRAVMWTLHMAESDHDERIIGGSPAEYMECYGLLDERLQVAHCVYFDRKDVRLLHRHNVKVASQVVSNAYLGSGVAPVPEMVERGMAVGIGTDNNNSSDSVNMIGDMKFMAHIHRAVHRDADVLTPEKILEMATIDGARSLGMDHEIGSIETGKRADLILLDLRHPQTTPHHHLAATIVFQAYGNEVDTVLIDGNVVMENRRLSFLPPERELAFLEEAQSRATAILQRANMVANPAWRSL

SEQ ID NO: 293 - protein, 473 aa, Artificial Sequence
  Description of Artificial Sequence: Synthetic peptide
MQTLSIQHGTLVTMDQYRRVLGDSWVHVQDGRIVALGVHAESVPPPADRVIDARGKVVLPGFINAHTHVNQILLRGGPSHGRQFYDWLFNVVYPGQKAMRPEVAVAVRLYCAEAVRSGITTINEEADSAIYPGNIEAAMAVYGEVGVRVVYARMFFDRMDGRIQGYVDALKARSPQVELCSIMEETAVAKDRITALSDQYHGTAGGRISVWPAPATITPVTVEGMRWAQAFARDRAVMWTLHMAESDHDERIIGWSPAEYMECYGLLDERLQVAHCVYFDRKDVRLLHRHNVKVASQVVSNAYLGSGVAPVPEMVERGMAVGIGTDNDNSCDSVNMIGDMKFMAHIHRAVHRDADVLTPEKILEMATIDGARSLGMDHEIGSIETGKRADLILLDLRHPQTTPHHHLAATIVFQAYGNEVDTVLIDGNVVMENRRLSFLPPERELAFLEEAQSRATAILQRANMVANPAWRSL

SEQ ID NO: 294 - protein, 473 aa, Artificial Sequence
  Description of Artificial Sequence: Synthetic peptide
MQTLSIQHGTLVTMDQYRRVLGDSWVHVQDGRIVALGVHAESVPPPADRVIDARGKVVLPGFINAHTHVNQILLRGGPSHGRQFYDWLFNVVYPGQKAMRPEVAVAVRLYCAEAVRSGITTINEEADSAIYPGNIEAAMAVYGEVGVRVVYARMFFDRMDGRIQGYVDALKARSPQVELCSIMEETAVAKDRITALSDQYHGTAGGRISVWPAPATITPVTVEGMRWAQAFARDRAVMWTLHMAESDHDERIIGWSPAEYMECYGLLDERLQVAHCVYFDRKDVRLLHRHNVKVASQVVSNAYLGSGVAPVPEMVERGMAVGIGTDNDNSSDSVNMIGDMKFMAHIHRAVHRDADVLTPEKILEMATIDGARSLGMDHEIGSIETGKRADLILLDLRHPQTTPHHHLAATIVFQAYGNEVDTVLIDGNVVMENRRLSFLPPERELAFLEEAQSRATAILQRANMVANPAWRSL

SEQ ID NO: 295 - protein, 473 aa, Artificial Sequence
  Description of Artificial Sequence: Synthetic peptide
MQTLSIQHGTLVTMDQYRRVLGDSWVHVQDGRIVALGVHAESVPPPADRVIDARGKVVLPGFINAHTHVNQILLRGGPSHGRQFYDWLFNVVYPGQKAMRPEVAVAVRLYCAEAVRSGITTINEEADSAIYPGNIEAAMAVYGEVGVRVVYARMFFDRMDGRIQGYVDALKARSPQVELCSIMEETAVAKDRITALSDQYHGTAGGRISVWPAPATITPVTVEGMRWAQAFARDRAVMWTLHMAESDHDERIIGWSPAEYMECYGLLDERLQVAHCVYFDRKDVRLLHRHNVKVASQVVSNAYLGSGVAPVPEMVERGMAVGIGTDNNNSCDSVNMIGDMKFMAHIHRAVHRDADVLTPEKILEMATIDGARSLGMDHEIGSIETGKRADLILLDLRHPQTTPHHHLAATIVFQAYGNEVDTVLIDGNVVMENRRLSFLPPERELAFLEEAQSRATAILQRANMVANPAWRSL

SEQ ID NO: 296 - protein, 473 aa, Artificial Sequence
  Description of Artificial Sequence: Synthetic peptide
MQTLSIQHGTLVTMDQYRRVLGDSWVHVQDGRIVALGVHAESVPPPADRVIDARGKVVLPGFINAHTHVNQILLRGGPSHGRQFYDWLFNVVYPGQKAMRPEVAVAVRLYCAEAVRSGITTINEEADSAIYPGNIEAAMAVYGEVGVRVVYARMFFDRMDGRIQGYVDALKARSPQVELCSIMEETAVAKDRITALSDQYHGTAGGRISVWPAPATITPVTVEGMRWAQAFARDRAVMWTLHMAESDHDERIIGWSPAEYMECYGLLDERLQVAHCVYFDRKDVRLLHRHNVKVASQVVSNAYLGSGVAPVPEMVERGMAVGIGTDNNNSSDSVNMIGDMKFMAHIHRAVHRDADVLTPEKILEMATIDGARSLGMDHEIGSIETGKRADLILLDLRHPQTTPHHHLAATIVFQAYGNEVDTVLIDGNVVMENRRLSFLPPERELAFLEEAQSRATAILQRANMVANPAWRSL

SEQ ID NO: 297 - protein, 473 aa, Artificial Sequence
  Description of Artificial Sequence: Synthetic peptide
MQTLSIQHGTLVTMDQYRRVLGDSWVHVQDGRIVALGVHAESVPPPADRVIDARGKVVLPGFINAHTHVNQILLRGGPSHGRQFYDWLFNVVYPGQKAMRPEVAVAVRLYCAEAVRSGITTINEEADSAIYPGNIEAAMAVYGEVGVRVVYARMFFDRMDGRIQGYVDALKARSPQVELCSIMEETAVAKDRITALSDQYHGTAGGRISVWPAPATITPVTVEGMRWAQAFARDRAVMWTLHMAESDHDERILGGSPAEYMECYGLLDERLQVAHCVYFDRKDVRLLHRHNVKVASQVVSNAYLGSGVAPVPEMVERGMAVGIGTDNDNSCDSVNMIGDMKFMAHIHRAVHRDADVLTPEKILEMATIDGARSLGMDHEIGSIETGKRADLILLDLRHPQTTPHHHLAATIVFQAYGNEVDTVLIDGNVVMENRRLSFLPPERELAFLEEAQSRATAILQRANMVANPAWRSL

SEQ ID NO: 298 - protein, 473 aa, Artificial Sequence
  Description of Artificial Sequence: Synthetic peptide
MQTLSIQHGTLVTMDQYRRVLGDSWVHVQDGRIVALGVHAESVPPPADRVIDARGKVVLPGFINAHTHVNQILLRGGPSHGRQFYDWLFNVVYPGQKAMRPEVAVAVRLYCAEAVRSGITTINEEADSAIYPGNIEAAMAVYGEVGVRVVYARMFFDRMDGRIQGYVDALKARSPQVELCSIMEETAVAKDRITALSDQYHGTAGGRISVWPAPATITPVTVEGMRWAQAFARDRAVMWTLHMAESDHDERILGGSPAEYMECYGLLDERLQVAHCVYFDRKDVRLLHRHNVKVASQVVSNAYLGSGVAPVPEMVERGMAVGIGTDNDNSSDSVNMIGDMKFMAHIHRAVHRDADVLTPEKILEMATIDGARSLGMDHEIGSIETGKRADLILLDLRHPQTTPHHHLAATIVFQAYGNEVDTVLIDGNVVMENRRLSFLPPERELAFLEEAQSRATAILQRANMVANPAWRSL

SEQ ID NO: 299 - protein, 473 aa, Artificial Sequence
  Description of Artificial Sequence: Synthetic peptide
MQTLSIQHGTLVTMDQYRRVLGDSWVHVQDGRIVALGVHAESVPPPADRVIDARGKVVLPGFINAHTHVNQILLRGGPSHGRQFYDWLFNVVYPGQKAMRPEVAVAVRLYCAEAVRSGITTINEEADSAIYPGNIEAAMAVYGEVGVRVVYARMFFDRMDGRIQGYVDALKARSPQVELCSIMEETAVAKDRITALSDQYHGTAGGRISVWPAPATITPVTVEGMRWAQAFARDRAVMWTLHMAESDHDERILGGSPAEYMECYGLLDERLQVAHCVYFDRKDVRLLHRHNVKVASQVVSNAYLGSGVAPVPEMVERGMAVGIGTDNNNSCDSVNMIGDMKFMAHIHRAVHRDADVLTPEKILEMATIDGARSLGMDHEIGSIETGKRADLILLDLRHPQTTPHHHLAATIVFQAYGNEVDTVLIDGNVVMENRRLSFLPPERELAFLEEAQSRATAILQRANMVANPAWRSL

SEQ ID NO: 300 - protein, 473 aa, Artificial Sequence
  Description of Artificial Sequence: Synthetic peptide
MQTLSIQHGTLVTMDQYRRVLGDSWVHVQDGRIVALGVHAESVPPPADRVIDARGKVVLPGFINAHTHVNQILLRGGPSHGRQFYDWLFNVVYPGQKAMRPEVAVAVRLYCAEAVRSGITTINEEADSAIYPGNIEAAMAVYGEVGVRVVYARMFFDRMDGRIQGYVDALKARSPQVELCSIMEETAVAKDRITALSDQYHGTAGGRISVWPAPATITPVTVEGMRWAQAFARDRAVMWTLHMAESDHDERILGGSPAEYMECYGLLDERLQVAHCVYFDRKDVRLLHRHNVKVASQVVSNAYLGSGVAPVPEMVERGMAVGIGTDNNNSSDSVNMIGDMKFMAHIHRAVHRDADVLTPEKILEMATIDGARSLGMDHEIGSIETGKRADLILLDLRHPQTTPHHHLAATIVFQAYGNEVDTVLIDGNVVMENRRLSFLPPERELAFLEEAQSRATAILQRANMVANPAWRSL

SEQ ID NO: 301 - protein, 473 aa, Artificial Sequence
  Description of Artificial Sequence: Synthetic peptide
MQTLSIQHGTLVTMDQYRRVLGDSWVHVQDGRIVALGVHAESVPPPADRVIDARGKVVLPGFINAHTHVNQILLRGGPSHGRQFYDWLFNVVYPGQKAMRPEVAVAVRLYCAEAVRSGITTINEEADSAIYPGNIEAAMAVYGEVGVRVVYARMFFDRMDGRIQGYVDALKARSPQVELCSIMEETAVAKDRITALSDQYHGTAGGRISVWPAPATITPVTVEGMRWAQAFARDRAVMWTLHMAESDHDERILGWSPAEYMECYGLLDERLQVAHCVYFDRKDVRLLHRHNVKVASQVVSNAYLGSGVAPVPEMVERGMAVGIGTDNDNSCDSVNMIGDMKFMAHIHRAVHRDADVLTPEKILEMATIDGARSLGMDHEIGSIETGKRADLILLDLRHPQTTPHHHLAATIVFQAYGNEVDTVLIDGNVVMENRRLSFLPPERELAFLEEAQSRATAILQRANMVANPAWRSL

SEQ ID NO: 302 - protein, 473 aa, Artificial Sequence
  Description of Artificial Sequence: Synthetic peptide
MQTLSIQHGTLVTMDQYRRVLGDSWVHVQDGRIVALGVHAESVPPPADRVIDARGKVVLPGFINAHTHVNQILLRGGPSHGRQFYDWLFNVVYPGQKAMRPEVAVAVRLYCAEAVRSGITTINEEADSAIYPGNIEAAMAVYGEVGVRVVYARMFFDRMDGRIQGYVDALKARSPQVELCSIMEETAVAKDRITALSDQYHGTAGGRISVWPAPATITPVTVEGMRWAQAFARDRAVMWTLHMAESDHDERILGWSPAEYMECYGLLDERLQVAHCVYFDRKDVRLLHRHNVKVASQVVSNAYLGSGVAPVPEMVERGMAVGIGTDNDNSSDSVNMIGDMKFMAHIHRAVHRDADVLTPEKILEMATIDGARSLGMDHEIGSIETGKRADLILLDLRHPQTTPHHHLAATIVFQAYGNEVDTVLIDGNVVMENRRLSFLPPERELAFLEEAQSRATAILQRANMVANPAWRSL

SEQ ID NO: 303 - protein, 473 aa, Artificial Sequence
  Description of Artificial Sequence: Synthetic peptide
MQTLSIQHGTLVTMDQYRRVLGDSWVHVQDGRIVALGVHAESVPPPADRVIDARGKVVLPGFINAHTHVNQILLRGGPSHGRQFYDWLFNVVYPGQKAMRPEVAVAVRLYCAEAVRSGITTINEEADSAIYPGNIEAAMAVYGEVGVRVVYARMFFDRMDGRIQGYVDALKARSPQVELCSIMEETAVAKDRITALSDQYHGTAGGRISVWPAPATITPVTVEGMRWAQAFARDRAVMWTLHMAESDHDERILGWSPAEYMECYGLLDERLQVAHCVYFDRKDVRLLHRHNVKVASQVVSNAYLGSGVAPVPEMVERGMAVGIGTDNNNSCDSVNMIGDMKFMAHIHRAVHRDADVLTPEKILEMATIDGARSLGMDHEIGSIETGKRADLILLDLRHPQTTPHHHLAATIVFQAYGNEVDTVLIDGNVVMENRRLSFLPPERELAFLEEAQSRATAILQRANMVANPAWRSL

SEQ ID NO: 304 - protein, 473 aa, Artificial Sequence
  Description of Artificial Sequence: Synthetic peptide
MQTLSIQHGTLVTMDQYRRVLGDSWVHVQDGRIVALGVHAESVPPPADRVIDARGKVVLPGFINAHTHVNQILLRGGPSHGRQFYDWLFNVVYPGQKAMRPEVAVAVRLYCAEAVRSGITTINEEADSAIYPGNIEAAMAVYGEVGVRVVYARMFFDRMDGRIQGYVDALKARSPQVELCSIMEETAVAKDRITALSDQYHGTAGGRISVWPAPATITPVTVEGMRWAQAFARDRAVMWTLHMAESDHDERILGWSPAEYMECYGLLDERLQVAHCVYFDRKDVRLLHRHNVKVASQVVSNAYLGSGVAPVPEMVERGMAVGIGTDNNNSSDSVNMIGDMKFMAHIHRAVHRDADVLTPEKILEMATIDGARSLGMDHEIGSIETGKRADLILLDLRHPQTTPHHHLAATIVFQAYGNEVDTVLIDGNVVMENRRLSFLPPERELAFLEEAQSRATAILQRANMVANPAWRSL

SEQ ID NO: 305 - protein, 473 aa, Artificial Sequence
  Description of Artificial Sequence: Synthetic peptide
MQTLSIQHGTLVTMDQYRRVLGDSWVHVQDGRIVALGVHAESVPPPADRVIDARGKVVLPGFINAHTHVNQILLRGGPSHGRQFYDWLFNVVYPGQKAMRPEVAVAVRLYCAEAVRSGITTINEEADSAIYPGNIEAAMAVYGEVGVRVVYARMFFDRMDGRIQGYVDALKARSPQVELCSIMEETAVAKDRITALSDQYHGTAGGRISVWPAPATITTVTVEGMRWAQAFARDRAVMWTLHMAESDHDERIIGGSPAEYMECYGLLDERLQVAHCVYFDRKDVRLLHRHNVKVASQVVSNAYLGSGVAPVPEMVERGMAVGIGTDNDNSCDSVNMIGDMKFMAHIHRAVHRDADVLTPEKILEMATIDGARSLGMDHEIGSIETGKRADLILLDLRHPQTTPHHHLAATIVFQAYGNEVDTVLIDGNVVMENRRLSFLPPERELAFLEEAQSRATAILQRANMVANPAWRSL

SEQ ID NO: 306 - protein, 473 aa, Artificial Sequence
  Description of Artificial Sequence: Synthetic peptide
MQTLSIQHGTLVTMDQYRRVLGDSWVHVQDGRIVALGVHAESVPPPADRVIDARGKVVLPGFINAHTHVNQILLRGGPSHGRQFYDWLFNVVYPGQKAMRPEVAVAVRLYCAEAVRSGITTINEEADSAIYPGNIEAAMAVYGEVGVRVVYARMFFDRMDGRIQGYVDALKARSPQVELCSIMEETAVAKDRITALSDQYHGTAGGRISVWPAPATITTVTVEGMRWAQAFARDRAVMWTLHMAESDHDERIIGGSPAEYMECYGLLDERLQVAHCVYFDRKDVRLLHRHNVKVASQVVSNAYLGSGVAPVPEMVERGMAVGIGTDNDNSSDSVNMIGDMKFMAHIHRAVHRDADVLTPEKILEMATIDGARSLGMDHEIGSIETGKRADLILLDLRHPQTTPHHHLAATIVFQAYGNEVDTVLIDGNVVMENRRLSFLPPERELAFLEEAQSRATAILQRANMVANPAWRSL

SEQ ID NO: 307 - protein, 473 aa, Artificial Sequence
  Description of Artificial Sequence: Synthetic peptide
MQTLSIQHGTLVTMDQYRRVLGDSWVHVQDGRIVALGVHAESVPPPADRVIDARGKVVLPGFINAHTHVNQILLRGGPSHGRQFYDWLFNVVYPGQKAMRPEVAVAVRLYCAEAVRSGITTINEEADSAIYPGNIEAAMAVYGEVGVRVVYARMFFDRMDGRIQGYVDALKARSPQVELCSIMEETAVAKDRITALSDQYHGTAGGRISVWPAPATITTVTVEGMRWAQAFARDRAVMWTLHMAESDHDERIIGGSPAEYMECYGLLDERLQVAHCVYFDRKDVRLLHRHNVKVASQVVSNAYLGSGVAPVPEMVERGMAVGIGTDNNNSCDSVNMIGDMKFMAHIHRAVHRDADVLTPEKILEMATIDGARSLGMDHEIGSIETGKRADLILLDLRHPQTTPHHHLAATIVFQAYGNEVDTVLIDGNVVMENRRLSFLPPERELAFLEEAQSRATAILQRANMVANPAWRSL

SEQ ID NO: 308 - protein, 473 aa, Artificial Sequence
  Description of Artificial Sequence: Synthetic peptide
MQTLSIQHGTLVTMDQYRRVLGDSWVHVQDGRIVALGVHAESVPPPADRVIDARGKVVLPGFINAHTHVNQILLRGGPSHGRQFYDWLFNVVYPGQKAMRPEVAVAVRLYCAEAVRSGITTINEEADSAIYPGNIEAAMAVYGEVGVRVVYARMFFDRMDGRIQGYVDALKARSPQVELCSIMEETAVAKDRITALSDQYHGTAGGRISVWPAPATITTVTVEGMRWAQAFARDRAVMWTLHMAESDHDERIIGGSPAEYMECYGLLDERLQVAHCVYFDRKDVRLLHRHNVKVASQVVSNAYLGSGVAPVPEMVERGMAVGIGTDNNNSSDSVNMIGDMKFMAHIHRAVHRDADVLTPEKILEMATIDGARSLGMDHEIGSIETGKRADLILLDLRHPQTTPHHHLAATIVFQAYGNEVDTVLIDGNVVMENRRLSFLPPERELAFLEEAQSRATAILQRANMVANPAWRSL

SEQ ID NO: 309 - protein, 473 aa, Artificial Sequence
  Description of Artificial Sequence: Synthetic peptide
MQTLSIQHGTLVTMDQYRRVLGDSWVHVQDGRIVALGVHAESVPPPADRVIDARGKVVLPGFINAHTHVNQILLRGGPSHGRQFYDWLFNVVYPGQKAMRPEVAVAVRLYCAEAVRSGITTINEEADSAIYPGNIEAAMAVYGEVGVRVVYARMFFDRMDGRIQGYVDALKARSPQVELCSIMEETAVAKDRITALSDQYHGTAGGRISVWPAPATITTVTVEGMRWAQAFARDRAVMWTLHMAESDHDERIIGWSPAEYMECYGLLDERLQVAHCVYFDRKDVRLLHRHNVKVASQVVSNAYLGSGVAPVPEMVERGMAVGIGTDNDNSCDSVNMIGDMKFMAHIHRAVHRDADVLTPEKILEMATIDGARSLGMDHEIGSIETGKRADLILLDLRHPQTTPHHHLAATIVFQAYGNEVDTVLIDGNVVMENRRLSFLPPERELAFLEEAQSRATAILQRANMVANPAWRSL

SEQ ID NO: 310 - protein, 473 aa, Artificial Sequence
  Description of Artificial Sequence: Synthetic peptide
MQTLSIQHGTLVTMDQYRRVLGDSWVHVQDGRIVALGVHAESVPPPADRVIDARGKVVLPGFINAHTHVNQILLRGGPSHGRQFYDWLFNVVYPGQKAMRPEVAVAVRLYCAEAVRSGITTINEEADSAIYPGNIEAAMAVYGEVGVRVVYARMFFDRMDGRIQGYVDALKARSPQVELCSIMEETAVAKDRITALSDQYHGTAGGRISVWPAPATITTVTVEGMRWAQAFARDRAVMWTLHMAESDHDERIIGWSPAEYMECYGLLDERLQVAHCVYFDRKDVRLLHRHNVKVASQVVSNAYLGSGVAPVPEMVERGMAVGIGTDNDNSSDSVNMIGDMKFMAHIHRAVHRDADVLTPEKILEMATIDGARSLGMDHEIGSIETGKRADLILLDLRHPQTTPHHHLAATIVFQAYGNEVDTVLIDGNVVMENRRLSFLPPERELAFLEEAQSRATAILQRANMVANPAWRSL

SEQ ID NO: 311 - protein, 473 aa, Artificial Sequence
  Description of Artificial Sequence: Synthetic peptide
MQTLSIQHGTLVTMDQYRRVLGDSWVHVQDGRIVALGVHAESVPPPADRVIDARGKVVLPGFINAHTHVNQILLRGGPSHGRQFYDWLFNVVYPGQKAMRPEVAVAVRLYCAEAVRSGITTINEEADSAIYPGNIEAAMAVYGEVGVRVVYARMFFDRMDGRIQGYVDALKARSPQVELCSIMEETAVAKDRITALSDQYHGTAGGRISVWPAPATITTVTVEGMRWAQAFARDRAVMWTLHMAESDHDERIIGWSPAEYMECYGLLDERLQVAHCVYFDRKDVRLLHRHNVKVASQVVSNAYLGSGVAPVPEMVERGMAVGIGTDNNNSCDSVNMIGDMKFMAHIHRAVHRDADVLTPEKILEMATIDGARSLGMDHEIGSIETGKRADLILLDLRHPQTTPHHHLAATIVFQAYGNEVDTVLIDGNVVMENRRLSFLPPERELAFLEEAQSRATAILQRANMVANPAWRSL

SEQ ID NO: 312 - protein, 473 aa, Artificial Sequence
  Description of Artificial Sequence: Synthetic peptide
MQTLSIQHGTLVTMDQYRRVLGDSWVHVQDGRIVALGVHAESVPPPADRVIDARGKVVLPGFINAHTHVNQILLRGGPSHGRQFYDWLFNVVYPGQKAMRPEVAVAVRLYCAEAVRSGITTINEEADSAIYPGNIEAAMAVYGEVGVRVVYARMFFDRMDGRIQGYVDALKARSPQVELCSIMEETAVAKDRITALSDQYHGTAGGRISVWPAPATITTVTVEGMRWAQAFARDRAVMWTLHMAESDHDERIIGWSPAEYMECYGLLDERLQVAHCVYFDRKDVRLLHRHNVKVASQVVSNAYLGSGVAPVPEMVERGMAVGIGTDNNNSSDSVNMIGDMKFMAHIHRAVHRDADVLTPEKILEMATIDGARSLGMDHEIGSIETGKRADLILLDLRHPQTTPHHHLAATIVFQAYGNEVDTVLIDGNVVMENRRLSFLPPERELAFLEEAQSRATAILQRANMVANPAWRSL

SEQ ID NO: 313 - protein, 473 aa, Artificial Sequence
  Description of Artificial Sequence: Synthetic peptide
MQTLSIQHGTLVTMDQYRRVLGDSWVHVQDGRIVALGVHAESVPPPADRVIDARGKVVLPGFINAHTHVNQILLRGGPSHGRQFYDWLFNVVYPGQKAMRPEVAVAVRLYCAEAVRSGITTINEEADSAIYPGNIEAAMAVYGEVGVRVVYARMFFDRMDGRIQGYVDALKARSPQVELCSIMEETAVAKDRITALSDQYHGTAGGRISVWPAPATITTVTVEGMRWAQAFARDRAVMWTLHMAESDHDERILGGSPAEYMECYGLLDERLQVAHCVYFDRKDVRLLHRHNVKVASQVVSNAYLGSGVAPVPEMVERGMAVGIGTDNDNSCDSVNMIGDMKFMAHIHRAVHRDADVLTPEKILEMATIDGARSLGMDHEIGSIETGKRADLILLDLRHPQTTPHHHLAATIVFQAYGNEVDTVLIDGNVVMENRRLSFLPPERELAFLEEAQSRATAILQRANMVANPAWRSL

SEQ ID NO: 314 - protein, 473 aa, Artificial Sequence
  Description of Artificial Sequence: Synthetic peptide
MQTLSIQHGTLVTMDQYRRVLGDSWVHVQDGRIVALGVHAESVPPPADRVIDARGKVVLPGFINAHTHVNQILLRGGPSHGRQFYDWLFNVVYPGQKAMRPEVAVAVRLYCAEAVRSGITTINEEADSAIYPGNIEAAMAVYGEVGVRVVYARMFFDRMDGRIQGYVDALKARSPQVELCSIMEETAVAKDRITALSDQYHGTAGGRISVWPAPATITTVTVEGMRWAQAFARDRAVMWTLHMAESDHDERILGGSPAEYMECYGLLDERLQVAHCVYFDRKDVRLLHRHNVKVASQVVSNAYLGSGVAPVPEMVERGMAVGIGTDNDNSSDSVNMIGDMKFMAHIHRAVHRDADVLTPEKILEMATIDGARSLGMDHEIGSIETGKRADLILLDLRHPQTTPHHHLAATIVFQAYGNEVDTVLIDGNVVMENRRLSFLPPERELAFLEEAQSRATAILQRANMVANPAWRSL

SEQ ID NO: 315 - protein, 473 aa, Artificial Sequence
  Description of Artificial Sequence: Synthetic peptide
MQTLSIQHGTLVTMDQYRRVLGDSWVHVQDGRIVALGVHAESVPPPADRVIDARGKVVLPGFINAHTHVNQILLRGGPSHGRQFYDWLFNVVYPGQKAMRPEVAVAVRLYCAEAVRSGITTINEEADSAIYPGNIEAAMAVYGEVGVRVVYARMFFDRMDGRIQGYVDALKARSPQVELCSIMEETAVAKDRITALSDQYHGTAGGRISVWPAPATITTVTVEGMRWAQAFARDRAVMWTLHMAESDHDERILGGSPAEYMECYGLLDERLQVAHCVYFDRKDVRLLHRHNVKVASQVVSNAYLGSGVAPVPEMVERGMAVGIGTDNNNSCDSVNMIGDMKFMAHIHRAVHRDADVLTPEKILEMATIDGARSLGMDHEIGSIETGKRADLILLDLRHPQTTPHHHLAATIVFQAYGNEVDTVLIDGNVVMENRRLSFLPPERELAFLEEAQSRATAILQRANMVANPAWRSL

SEQ ID NO: 316 - protein, 473 aa, Artificial Sequence
  Description of Artificial Sequence: Synthetic peptide
MQTLSIQHGTLVTMDQYRRVLGDSWVHVQDGRIVALGVHAESVPPPADRVIDARGKVVLPGFINAHTHVNQILLRGGPSHGRQFYDWLFNVVYPGQKAMRPEVAVAVRLYCAEAVRSGITTINEEADSAIYPGNIEAAMAVYGEVGVRVVYARMFFDRMDGRIQGYVDALKARSPQVELCSIMEETAVAKDRITALSDQYHGTAGGRISVWPAPATITTVTVEGMRWAQAFARDRAVMWTLHMAESDHDERILGGSPAEYMECYGLLDERLQVAHCVYFDRKDVRLLHRHNVKVASQVVSNAYLGSGVAPVPEMVERGMAVGIGTDNNNSSDSVNMIGDMKFMAHIHRAVHRDADVLTPEKILEMATIDGARSLGMDHEIGSIETGKRADLILLDLRHPQTTPHHHLAATIVFQAYGNEVDTVLIDGNVVMENRRLSFLPPERELAFLEEAQSRATAILQRANMVANPAWRSL

SEQ ID NO: 317 - protein, 473 aa, Artificial Sequence
  Description of Artificial Sequence: Synthetic peptide
MQTLSIQHGTLVTMDQYRRVLGDSWVHVQDGRIVALGVHAESVPPPADRVIDARGKVVLPGFINAHTHVNQILLRGGPSHGRQFYDWLFNVVYPGQKAMRPEVAVAVRLYCAEAVRSGITTINEEADSAIYPGNIEAAMAVYGEVGVRVVYARMFFDRMDGRIQGYVDALKARSPQVELCSIMEETAVAKDRITALSDQYHGTAGGRISVWPAPATITTVTVEGMRWAQAFARDRAVMWTLHMAESDHDERILGWSPAEYMECYGLLDERLQVAHCVYFDRKDVRLLHRHNVKVASQVVSNAYLGSGVAPVPEMVERGMAVGIGTDNDNSCDSVNMIGDMKFMAHIHRAVHRDADVLTPEKILEMATIDGARSLGMDHEIGSIETGKRADLILLDLRHPQTTPHHHLAATIVFQAYGNEVDTVLIDGNVVMENRRLSFLPPERELAFLEEAQSRATAILQRANMVANPAWRSL

SEQ ID NO: 318 - protein, 473 aa, Artificial Sequence
  Description of Artificial Sequence: Synthetic peptide
MQTLSIQHGTLVTMDQYRRVLGDSWVHVQDGRIVALGVHAESVPPPADRVIDARGKVVLPGFINAHTHVNQILLRGGPSHGRQFYDWLFNVVYPGQKAMRPEVAVAVRLYCAEAVRSGITTINEEADSAIYPGNIEAAMAVYGEVGVRVVYARMFFDRMDGRIQGYVDALKARSPQVELCSIMEETAVAKDRITALSDQYHGTAGGRISVWPAPATITTVTVEGMRWAQAFARDRAVMWTLHMAESDHDERILGWSPAEYMECYGLLDERLQVAHCVYFDRKDVRLLHRHNVKVASQVVSNAYLGSGVAPVPEMVERGMAVGIGTDNDNSSDSVNMIGDMKFMAHIHRAVHRDADVLTPEKILEMATIDGARSLGMDHEIGSIETGKRADLILLDLRHPQTTPHHHLAATIVFQAYGNEVDTVLIDGNVVMENRRLSFLPPERELAFLEEAQSRATAILQRANMVANPAWRSL

SEQ ID NO: 319 - protein, 473 aa, Artificial Sequence
  Description of Artificial Sequence: Synthetic peptide
MQTLSIQHGTLVTMDQYRRVLGDSWVHVQDGRIVALGVHAESVPPPADRVIDARGKVVLPGFINAHTHVNQILLRGGPSHGRQFYDWLFNVVYPGQKAMRPEVAVAVRLYCAEAVRSGITTINEEADSAIYPGNIEAAMAVYGEVGVRVVYARMFFDRMDGRIQGYVDALKARSPQVELCSIMEETAVAKDRITALSDQYHGTAGGRISVWPAPATITTVTVEGMRWAQAFARDRAVMWTLHMAESDHDERILGWSPAEYMECYGLLDERLQVAHCVYFDRKDVRLLHRHNVKVASQVVSNAYLGSGVAPVPEMVERGMAVGIGTDNNNSCDSVNMIGDMKFMAHIHRAVHRDADVLTPEKILEMATIDGARSLGMDHEIGSIETGKRADLILLDLRHPQTTPHHHLAATIVFQAYGNEVDTVLIDGNVVMENRRLSFLPPERELAFLEEAQSRATAILQRANMVANPAWRSL

SEQ ID NO: 320 - protein, 473 aa, Artificial Sequence
  Description of Artificial Sequence: Synthetic peptide
MQTLSIQHGTLVTMDQYRRVLGDSWVHVQDGRIVALGVHAESVPPPADRVIDARGKVVLPGFINAHTHVNQILLRGGPSHGRQFYDWLFNVVYPGQKAMRPEVAVAVRLYCAEAVRSGITTINEEADSAIYPGNIEAAMAVYGEVGVRVVYARMFFDRMDGRIQGYVDALKARSPQVELCSIMEETAVAKDRITALSDQYHGTAGGRISVWPAPATITTVTVEGMRWAQAFARDRAVMWTLHMAESDHDERILGWSPAEYMECYGLLDERLQVAHCVYFDRKDVRLLHRHNVKVASQVVSNAYLGSGVAPVPEMVERGMAVGIGTDNNNSSDSVNMIGDMKFMAHIHRAVHRDADVLTPEKILEMATIDGARSLGMDHEIGSIETGKRADLILLDLRHPQTTPHHHLAATIVFQAYGNEVDTVLIDGNVVMENRRLSFLPPERELAFLEEAQSRATAILQRANMVANPAWRSL

SEQ ID NO: 321 - protein, 473 aa, Artificial Sequence
  Description of Artificial Sequence: Synthetic peptide
MQTLSIQHGTLVTMDQYRRVLGDSWVHVQDGRIVALGVHAESVPPPADRVIDARGKVVLPGFINAHTHVNQILLRGGPSHGRQFYDWLFNVVYPGQKAMRPEVAVAVRLYCAEAVRSGITTINEEADSAIYPGNIEAAMAVYGEVGVRVVYARMFFDRMDGRIQGYVDALKARSPQVELCSIMEETAVAKDRITALSDQYHGTAGGRISVWPAPATTTPVTVEGMRWAQAFARDRAVMWTLHMAESDHDERIIGGSPAEYMECYGLLDERLQVAHCVYFDRKDVRLLHRHNVKVASQVVSNAYLGSGVAPVPEMVERGMAVGIGTDNDNSCDSVNMIGDMKFMAHIHRAVHRDADVLTPEKILEMATIDGARSLGMDHEIGSIETGKRADLILLDLRHPQTTPHHHLAATIVFQAYGNEVDTVLIDGNVVMENRRLSFLPPERELAFLEEAQSRATAILQRANMVANPAWRSL

SEQ ID NO: 322 - protein, 473 aa, Artificial Sequence
  Description of Artificial Sequence: Synthetic peptide
MQTLSIQHGTLVTMDQYRRVLGDSWVHVQDGRIVALGVHAESVPPPADRVIDARGKVVLPGFINAHTHVNQILLRGGPSHGRQFYDWLFNVVYPGQKAMRPEVAVAVRLYCAEAVRSGITTINEEADSAIYPGNIEAAMAVYGEVGVRVVYARMFFDRMDGRIQGYVDALKARSPQVELCSIMEETAVAKDRITALSDQYHGTAGGRISVWPAPATTTPVTVEGMRWAQAFARDRAVMWTLHMAESDHDERIIGGSPAEYMECYGLLDERLQVAHCVYFDRKDVRLLHRHNVKVASQVVSNAYLGSGVAPVPEMVERGMAVGIGTDNDNSSDSVNMIGDMKFMAHIHRAVHRDADVLTPEKILEMATIDGARSLGMDHEIGSIETGKRADLILLDLRHPQTTPHHHLAATIVFQAYGNEVDTVLIDGNVVMENRRLSFLPPERELAFLEEAQSRATAILQRANMVANPAWRSL

SEQ ID NO: 323 - protein, 473 aa, Artificial Sequence
  Description of Artificial Sequence: Synthetic peptide
MQTLSIQHGTLVTMDQYRRVLGDSWVHVQDGRIVALGVHAESVPPPADRVIDARGKVVLPGFINAHTHVNQILLRGGPSHGRQFYDWLFNVVYPGQKAMRPEVAVAVRLYCAEAVRSGITTINEEADSAIYPGNIEAAMAVYGEVGVRVVYARMFFDRMDGRIQGYVDALKARSPQVELCSIMEETAVAKDRITALSDQYHGTAGGRISVWPAPATTTPVTVEGMRWAQAFARDRAVMWTLHMAESDHDERIIGGSPAEYMECYGLLDERLQVAHCVYFDRKDVRLLHRHNVKVASQVVSNAYLGSGVAPVPEMVERGMAVGIGTDNNNSCDSVNMIGDMKFMAHIHRAVHRDADVLTPEKILEMATIDGARSLGMDHEIGSIETGKRADLILLDLRHPQTTPHHHLAATIVFQAYGNEVDTVLIDGNVVMENRRLSFLPPERELAFLEEAQSRATAILQRANMVANPAWRSL

SEQ ID NO: 324 - protein, 473 aa, Artificial Sequence
  Description of Artificial Sequence: Synthetic peptide
MQTLSIQHGTLVTMDQYRRVLGDSWVHVQDGRIVALGVHAESVPPPADRVIDARGKVVLPGFINAHTHVNQILLRGGPSHGRQFYDWLFNVVYPGQKAMRPEVAVAVRLYCAEAVRSGITTINEEADSAIYPGNIEAAMAVYGEVGVRVVYARMFFDRMDGRIQGYVDALKARSPQVELCSIMEETAVAKDRITALSDQYHGTAGGRISVWPAPATTTPVTVEGMRWAQAFARDRAVMWTLHMAESDHDERIIGGSPAEYMECYGLLDERLQVAHCVYFDRKDVRLLHRHNVKVASQVVSNAYLGSGVAPVPEMVERGMAVGIGTDNNNSSDSVNMIGDMKFMAHIHRAVHRDADVLTPEKILEMATIDGARSLGMDHEIGSIETGKRADLILLDLRHPQTTPHHHLAATIVFQAYGNEVDTVLIDGNVVMENRRLSFLPPERELAFLEEAQSRATAILQRANMVANPAWRSL

SEQ ID NO: 325 - protein, 473 aa, Artificial Sequence
  Description of Artificial Sequence: Synthetic peptide
MQTLSIQHGTLVTMDQYRRVLGDSWVHVQDGRIVALGVHAESVPPPADRVIDARGKVVLPGFINAHTHVNQILLRGGPSHGRQFYDWLFNVVYPGQKAMRPEVAVAVRLYCAEAVRSGITTINEEADSAIYPGNIEAAMAVYGEVGVRVVYARMFFDRMDGRIQGYVDALKARSPQVELCSIMEETAVAKDRITALSDQYHGTAGGRISVWPAPATTTPVTVEGMRWAQAFARDRAVMWTLHMAESDHDERIIGWSPAEYMECYGLLDERLQVAHCVYFDRKDVRLLHRHNVKVASQVVSNAYLGSGVAPVPEMVERGMAVGIGTDNDNSCDSVNMIGDMKFMAHIHRAVHRDADVLTPEKILEMATIDGARSLGMDHEIGSIETGKRADLILLDLRHPQTTPHHHLAATIVFQAYGNEVDTVLIDGNVVMENRRLSFLPPERELAFLEEAQSRATAILQRANMVANPAWRSL

SEQ ID NO: 326 - protein, 473 aa, Artificial Sequence
  Description of Artificial Sequence: Synthetic peptide
MQTLSIQHGTLVTMDQYRRVLGDSWVHVQDGRIVALGVHAESVPPPADRVIDARGKVVLPGFINAHTHVNQILLRGGPSHGRQFYDWLFNVVYPGQKAMRPEVAVAVRLYCAEAVRSGITTINEEADSAIYPGNIEAAMAVYGEVGVRVVYARMFFDRMDGRIQGYVDALKARSPQVELCSIMEETAVAKDRITALSDQYHGTAGGRISVWPAPATTTPVTVEGMRWAQAFARDRAVMWTLHMAESDHDERIIGWSPAEYMECYGLLDERLQVAHCVYFDRKDVRLLHRHNVKVASQVVSNAYLGSGVAPVPEMVERGMAVGIGTDNDNSSDSVNMIGDMKFMAHIHRAVHRDADVLTPEKILEMATIDGARSLGMDHEIGSIETGKRADLILLDLRHPQTTPHHHLAATIVFQAYGNEVDTVLIDGNVVMENRRLSFLPPERELAFLEEAQSRATAILQRANMVANPAWRSL

SEQ ID NO: 327 - protein, 473 aa, Artificial Sequence
  Description of Artificial Sequence: Synthetic peptide
MQTLSIQHGTLVTMDQYRRVLGDSWVHVQDGRIVALGVHAESVPPPADRVIDARGKVVLPGFINAHTHVNQILLRGGPSHGRQFYDWLFNVVYPGQKAMRPEVAVAVRLYCAEAVRSGITTINEEADSAIYPGNIEAAMAVYGEVGVRVVYARMFFDRMDGRIQGYVDALKARSPQVELCSIMEETAVAKDRITALSDQYHGTAGGRISVWPAPATTTPVTVEGMRWAQAFARDRAVMWTLHMAESDHDERIIGWSPAEYMECYGLLDERLQVAHCVYFDRKDVRLLHRHNVKVASQVVSNAYLGSGVAPVPEMVERGMAVGIGTDNNNSCDSVNMIGDMKFMAHIHRAVHRDADVLTPEKILEMATIDGARSLGMDHEIGSIETGKRADLILLDLRHPQTTPHHHLAATIVFQAYGNEVDTVLIDGNVVMENRRLSFLPPERELAFLEEAQSRATAILQRANMVANPAWRSL

SEQ ID NO: 328 - protein, 473 aa, Artificial Sequence
  Description of Artificial Sequence: Synthetic peptide
MQTLSIQHGTLVTMDQYRRVLGDSWVHVQDGRIVALGVHAESVPPPADRVIDARGKVVLPGFINAHTHVNQILLRGGPSHGRQFYDWLFNVVYPGQKAMRPEVAVAVRLYCAEAVRSGITTINEEADSAIYPGNIEAAMAVYGEVGVRVVYARMFFDRMDGRIQGYVDALKARSPQVELCSIMEETAVAKDRITALSDQYHGTAGGRISVWPAPATTTPVTVEGMRWAQAFARDRAVMWTLHMAESDHDERIIGWSPAEYMECYGLLDERLQVAHCVYFDRKDVRLLHRHNVKVASQVVSNAYLGSGVAPVPEMVERGMAVGIGTDNNNSSDSVNMIGDMKFMAHIHRAVHRDADVLTPEKILEMATIDGARSLGMDHEIGSIETGKRADLILLDLRHPQTTPHHHLAATIVFQAYGNEVDTVLIDGNVVMENRRLSFLPPERELAFLEEAQSRATAILQRANMVANPAWRSL

SEQ ID NO: 329 - protein, 473 aa, Artificial Sequence
  Description of Artificial Sequence: Synthetic peptide
MQTLSIQHGTLVTMDQYRRVLGDSWVHVQDGRIVALGVHAESVPPPADRVIDARGKVVLPGFINAHTHVNQILLRGGPSHGRQFYDWLFNVVYPGQKAMRPEVAVAVRLYCAEAVRSGITTINEEADSAIYPGNIEAAMAVYGEVGVRVVYARMFFDRMDGRIQGYVDALKARSPQVELCSIMEETAVAKDRITALSDQYHGTAGGRISVWPAPATTTPVTVEGMRWAQAFARDRAVMWTLHMAESDHDERILGGSPAEYMECYGLLDERLQVAHCVYFDRKDVRLLHRHNVKVASQVVSNAYLGSGVAPVPEMVERGMAVGIGTDNDNSCDSVNMIGDMKFMAHIHRAVHRDADVLTPEKILEMATIDGARSLGMDHEIGSIETGKRADLILLDLRHPQTTPHHHLAATIVFQAYGNEVDTVLIDGNVVMENRRLSFLPPERELAFLEEAQSRATAILQRANMVANPAWRSL

SEQ ID NO: 330 - protein, 473 aa, Artificial Sequence
  Description of Artificial Sequence: Synthetic peptide
MQTLSIQHGTLVTMDQYRRVLGDSWVHVQDGRIVALGVHAESVPPPADRVIDARGKVVLPGFINAHTHVNQILLRGGPSHGRQFYDWLFNVVYPGQKAMRPEVAVAVRLYCAEAVRSGITTINEEADSAIYPGNIEAAMAVYGEVGVRVVYARMFFDRMDGRIQGYVDALKARSPQVELCSIMEETAVAKDRITALSDQYHGTAGGRISVWPAPATTTPVTVEGMRWAQAFARDRAVMWTLHMAESDHDERILGGSPAEYMECYGLLDERLQVAHCVYFDRKDVRLLHRHNVKVASQVVSNAYLGSGVAPVPEMVERGMAVGIGTDNDNSSDSVNMIGDMKFMAHIHRAVHRDADVLTPEKILEMATIDGARSLGMDHEIGSIETGKRADLILLDLRHPQTTPHHHLAATIVFQAYGNEVDTVLIDGNVVMENRRLSFLPPERELAFLEEAQSRATAILQRANMVANPAWRSL

SEQ ID NO: 331 - protein, 473 aa, Artificial Sequence
  Description of Artificial Sequence: Synthetic peptide
MQTLSIQHGTLVTMDQYRRVLGDSWVHVQDGRIVALGVHAESVPPPADRVIDARGKVVLPGFINAHTHVNQILLRGGPSHGRQFYDWLFNVVYPGQKAMRPEVAVAVRLYCAEAVRSGITTINEEADSAIYPGNIEAAMAVYGEVGVRVVYARMFFDRMDGRIQGYVDALKARSPQVELCSIMEETAVAKDRITALSDQYHGTAGGRISVWPAPATTTPVTVEGMRWAQAFARDRAVMWTLHMAESDHDERILGGSPAEYMECYGLLDERLQVAHCVYFDRKDVRLLHRHNVKVASQVVSNAYLGSGVAPVPEMVERGMAVGIGTDNNNSCDSVNMIGDMKFMAHIHRAVHRDADVLTPEKILEMATIDGARSLGMDHEIGSIETGKRADLILLDLRHPQTTPHHHLAATIVFQAYGNEVDTVLIDGNVVMENRRLSFLPPERELAFLEEAQSRATAILQRANMVANPAWRSL

SEQ ID NO: 332 - protein, 473 aa, Artificial Sequence
  Description of Artificial Sequence: Synthetic peptide
MQTLSIQHGTLVTMDQYRRVLGDSWVHVQDGRIVALGVHAESVPPPADRVIDARGKVVLPGFINAHTHVNQILLRGGPSHGRQFYDWLFNVVYPGQKAMRPEVAVAVRLYCAEAVRSGITTINEEADSAIYPGNIEAAMAVYGEVGVRVVYARMFFDRMDGRIQGYVDALKARSPQVELCSIMEETAVAKDRITALSDQYHGTAGGRISVWPAPATTTPVTVEGMRWAQAFARDRAVMWTLHMAESDHDERILGGSPAEYMECYGLLDERLQVAHCVYFDRKDVRLLHRHNVKVASQVVSNAYLGSGVAPVPEMVERGMAVGIGTDNNNSSDSVNMIGDMKFMAHIHRAVHRDADVLTPEKILEMATIDGARSLGMDHEIGSIETGKRADLILLDLRHPQTTPHHHLAATIVFQAYGNEVDTVLIDGNVVMENRRLSFLPPERELAFLEEAQSRATAILQRANMVANPAWRSL

SEQ ID NO: 333 - protein, 473 aa, Artificial Sequence
  Description of Artificial Sequence: Synthetic peptide
MQTLSIQHGTLVTMDQYRRVLGDSWVHVQDGRIVALGVHAESVPPPADRVIDARGKVVLPGFINAHTHVNQILLRGGPSHGRQFYDWLFNVVYPGQKAMRPEVAVAVRLYCAEAVRSGITTINEEADSAIYPGNIEAAMAVYGEVGVRVVYARMFFDRMDGRIQGYVDALKARSPQVELCSIMEETAVAKDRITALSDQYHGTAGGRISVWPAPATTTPVTVEGMRWAQAFARDRAVMWTLHMAESDHDERILGWSPAEYMECYGLLDERLQVAHCVYFDRKDVRLLHRHNVKVASQVVSNAYLGSGVAPVPEMVERGMAVGIGTDNDNSCDSVNMIGDMKFMAHIHRAVHRDADVLTPEKILEMATIDGARSLGMDHEIGSIETGKRADLILLDLRHPQTTPHHHLAATIVFQAYGNEVDTVLIDGNVVMENRRLSFLPPERELAFLEEAQSRATAILQRANMVANPAWRSL

SEQ ID NO: 334 - protein, 473 aa, Artificial Sequence
  Description of Artificial Sequence: Synthetic peptide
MQTLSIQHGTLVTMDQYRRVLGDSWVHVQDGRIVALGVHAESVPPPADRVIDARGKVVLPGFINAHTHVNQILLRGGPSHGRQFYDWLFNVVYPGQKAMRPEVAVAVRLYCAEAVRSGITTINEEADSAIYPGNIEAAMAVYGEVGVRVVYARMFFDRMDGRIQGYVDALKARSPQVELCSIMEETAVAKDRITALSDQYHGTAGGRISVWPAPATTTPVTVEGMRWAQAFARDRAVMWTLHMAESDHDERILGWSPAEYMECYGLLDERLQVAHCVYFDRKDVRLLHRHNVKVASQVVSNAYLGSGVAPVPEMVERGMAVGIGTDNDNSSDSVNMIGDMKFMAHIHRAVHRDADVLTPEKILEMATIDGARSLGMDHEIGSIETGKRADLILLDLRHPQTTPHHHLAATIVFQAYGNEVDTVLIDGNVVMENRRLSFLPPERELAFLEEAQSRATAILQRANMVANPAWRSL

SEQ ID NO: 335 - protein, 473 aa, Artificial Sequence
  Description of Artificial Sequence: Synthetic peptide
MQTLSIQHGTLVTMDQYRRVLGDSWVHVQDGRIVALGVHAESVPPPADRVIDARGKVVLPGFINAHTHVNQILLRGGPSHGRQFYDWLFNVVYPGQKAMRPEVAVAVRLYCAEAVRSGITTINEEADSAIYPGNIEAAMAVYGEVGVRVVYARMFFDRMDGRIQGYVDALKARSPQVELCSIMEETAVAKDRITALSDQYHGTAGGRISVWPAPATTTPVTVEGMRWAQAFARDRAVMWTLHMAESDHDERILGWSPAEYMECYGLLDERLQVAHCVYFDRKDVRLLHRHNVKVASQVVSNAYLGSGVAPVPEMVERGMAVGIGTDNNNSCDSVNMIGDMKFMAHIHRAVHRDADVLTPEKILEMATIDGARSLGMDHEIGSIETGKRADLILLDLRHPQTTPHHHLAATIVFQAYGNEVDTVLIDGNVVMENRRLSFLPPERELAFLEEAQSRATAILQRANMVANPAWRSL

SEQ ID NO: 336 - protein, 473 aa, Artificial Sequence
  Description of Artificial Sequence: Synthetic peptide
MQTLSIQHGTLVTMDQYRRVLGDSWVHVQDGRIVALGVHAESVPPPADRVIDARGKVVLPGFINAHTHVNQILLRGGPSHGRQFYDWLFNVVYPGQKAMRPEVAVAVRLYCAEAVRSGITTINEEADSAIYPGNIEAAMAVYGEVGVRVVYARMFFDRMDGRIQGYVDALKARSPQVELCSIMEETAVAKDRITALSDQYHGTAGGRISVWPAPATTTPVTVEGMRWAQAFARDRAVMWTLHMAESDHDERILGWSPAEYMECYGLLDERLQVAHCVYFDRKDVRLLHRHNVKVASQVVSNAYLGSGVAPVPEMVERGMAVGIGTDNNNSSDSVNMIGDMKFMAHIHRAVHRDADVLTPEKILEMATIDGARSLGMDHEIGSIETGKRADLILLDLRHPQTTPHHHLAATIVFQAYGNEVDTVLIDGNVVMENRRLSFLPPERELAFLEEAQSRATAILQRANMVANPAWRSL

SEQ ID NO: 337 - protein, 473 aa, Artificial Sequence
  Description of Artificial Sequence: Synthetic peptide
MQTLSIQHGTLVTMDQYRRVLGDSWVHVQDGRIVALGVHAESVPPPADRVIDARGKVVLPGFINAHTHVNQILLRGGPSHGRQFYDWLFNVVYPGQKAMRPEVAVAVRLYCAEAVRSGITTINEEADSAIYPGNIEAAMAVYGEVGVRVVYARMFFDRMDGRIQGYVDALKARSPQVELCSIMEETAVAKDRITALSDQYHGTAGGRISVWPAPATTTTVTVEGMRWAQAFARDRAVMWTLHMAESDHDERIIGGSPAEYMECYGLLDERLQVAHCVYFDRKDVRLLHRHNVKVASQVVSNAYLGSGVAPVPEMVERGMAVGIGTDNDNSCDSVNMIGDMKFMAHIHRAVHRDADVLTPEKILEMATIDGARSLGMDHEIGSIETGKRADLILLDLRHPQTTPHHHLAATIVFQAYGNEVDTVLIDGNVVMENRRLSFLPPERELAFLEEAQSRATAILQRANMVANPAWRSL

SEQ ID NO: 338 - protein, 473 aa, Artificial Sequence
  Description of Artificial Sequence: Synthetic peptide
MQTLSIQHGTLVTMDQYRRVLGDSWVHVQDGRIVALGVHAESVPPPADRVIDARGKVVLPGFINAHTHVNQILLRGGPSHGRQFYDWLFNVVYPGQKAMRPEVAVAVRLYCAEAVRSGITTINEEADSAIYPGNIEAAMAVYGEVGVRVVYARMFFDRMDGRIQGYVDALKARSPQVELCSIMEETAVAKDRITALSDQYHGTAGGRISVWPAPATTTTVTVEGMRWAQAFARDRAVMWTLHMAESDHDERIIGGSPAEYMECYGLLDERLQVAHCVYFDRKDVRLLHRHNVKVASQVVSNAYLGSGVAPVPEMVERGMAVGIGTDNDNSSDSVNMIGDMKFMAHIHRAVHRDADVLTPEKILEMATIDGARSLGMDHEIGSIETGKRADLILLDLRHPQTTPHHHLAATIVFQAYGNEVDTVLIDGNVVMENRRLSFLPPERELAFLEEAQSRATAILQRANMVANPAWRSL

SEQ ID NO: 339 - protein, 473 aa, Artificial Sequence
  Description of Artificial Sequence: Synthetic peptide
MQTLSIQHGTLVTMDQYRRVLGDSWVHVQDGRIVALGVHAESVPPPADRVIDARGKVVLPGFINAHTHVNQILLRGGPSHGRQFYDWLFNVVYPGQKAMRPEVAVAVRLYCAEAVRSGITTINEEADSAIYPGNIEAAMAVYGEVGVRVVYARMFFDRMDGRIQGYVDALKARSPQVELCSIMEETAVAKDRITALSDQYHGTAGGRISVWPAPATTTTVTVEGMRWAQAFARDRAVMWTLHMAESDHDERIIGGSPAEYMECYGLLDERLQVAHCVYFDRKDVRLLHRHNVKVASQVVSNAYLGSGVAPVPEMVERGMAVGIGTDNNNSCDSVNMIGDMKFMAHIHRAVHRDADVLTPEKILEMATIDGARSLGMDHEIGSIETGKRADLILLDLRHPQTTPHHHLAATIVFQAYGNEVDTVLIDGNVVMENRRLSFLPPERELAFLEEAQSRATAILQRANMVANPAWRSL

SEQ ID NO: 340 - protein, 473 aa, Artificial Sequence
  Description of Artificial Sequence: Synthetic peptide
MQTLSIQHGTLVTMDQYRRVLGDSWVHVQDGRIVALGVHAESVPPPADRVIDARGKVVLPGFINAHTHVNQILLRGGPSHGRQFYDWLFNVVYPGQKAMRPEVAVAVRLYCAEAVRSGITTINEEADSAIYPGNIEAAMAVYGEVGVRVVYARMFFDRMDGRIQGYVDALKARSPQVELCSIMEETAVAKDRITALSDQYHGTAGGRISVWPAPATTTTVTVEGMRWAQAFARDRAVMWTLHMAESDHDERIIGGSPAEYMECYGLLDERLQVAHCVYFDRKDVRLLHRHNVKVASQVVSNAYLGSGVAPVPEMVERGMAVGIGTDNNNSSDSVNMIGDMKFMAHIHRAVHRDADVLTPEKILEMATIDGARSLGMDHEIGSIETGKRADLILLDLRHPQTTPHHHLAATIVFQAYGNEVDTVLIDGNVVMENRRLSFLPPERELAFLEEAQSRATAILQRANMVANPAWRSL

SEQ ID NO: 341 - protein, 473 aa, Artificial Sequence
  Description of Artificial Sequence: Synthetic peptide
MQTLSIQHGTLVTMDQYRRVLGDSWVHVQDGRIVALGVHAESVPPPADRVIDARGKVVLPGFINAHTHVNQILLRGGPSHGRQFYDWLFNVVYPGQKAMRPEVAVAVRLYCAEAVRSGITTINEEADSAIYPGNIEAAMAVYGEVGVRVVYARMFFDRMDGRIQGYVDALKARSPQVELCSIMEETAVAKDRITALSDQYHGTAGGRISVWPAPATTTTVTVEGMRWAQAFARDRAVMWTLHMAESDHDERIIGWSPAEYMECYGLLDERLQVAHCVYFDRKDVRLLHRHNVKVASQVVSNAYLGSGVAPVPEMVERGMAVGIGTDNDNSCDSVNMIGDMKFMAHIHRAVHRDADVLTPEKILEMATIDGARSLGMDHEIGSIETGKRADLILLDLRHPQTTPHHHLAATIVFQAYGNEVDTVLIDGNVVMENRRLSFLPPERELAFLEEAQSRATAILQRANMVANPAWRSL

SEQ ID NO: 342 - protein, 473 aa, Artificial Sequence
  Description of Artificial Sequence: Synthetic peptide
MQTLSIQHGTLVTMDQYRRVLGDSWVHVQDGRIVALGVHAESVPPPADRVIDARGKVVLPGFINAHTHVNQILLRGGPSHGRQFYDWLFNVVYPGQKAMRPEVAVAVRLYCAEAVRSGITTINEEADSAIYPGNIEAAMAVYGEVGVRVVYARMFFDRMDGRIQGYVDALKARSPQVELCSIMEETAVAKDRITALSDQYHGTAGGRISVWPAPATTTTVTVEGMRWAQAFARDRAVMWTLHMAESDHDERIIGWSPAEYMECYGLLDERLQVAHCVYFDRKDVRLLHRHNVKVASQVVSNAYLGSGVAPVPEMVERGMAVGIGTDNDNSSDSVNMIGDMKFMAHIHRAVHRDADVLTPEKILEMATIDGARSLGMDHEIGSIETGKRADLILLDLRHPQTTPHHHLAATIVFQAYGNEVDTVLIDGNVVMENRRLSFLPPERELAFLEEAQSRATAILQRANMVANPAWRSL

SEQ ID NO: 343 - protein, 473 aa, Artificial Sequence
  Description of Artificial Sequence: Synthetic peptide
MQTLSIQHGTLVTMDQYRRVLGDSWVHVQDGRIVALGVHAESVPPPADRVIDARGKVVLPGFINAHTHVNQILLRGGPSHGRQFYDWLFNVVYPGQKAMRPEVAVAVRLYCAEAVRSGITTINEEADSAIYPGNIEAAMAVYGEVGVRVVYARMFFDRMDGRIQGYVDALKARSPQVELCSIMEETAVAKDRITALSDQYHGTAGGRISVWPAPATTTTVTVEGMRWAQAFARDRAVMWTLHMAESDHDERIIGWSPAEYMECYGLLDERLQVAHCVYFDRKDVRLLHRHNVKVASQVVSNAYLGSGVAPVPEMVERGMAVGIGTDNNNSCDSVNMIGDMKFMAHIHRAVHRDADVLTPEKILEMATIDGARSLGMDHEIGSIETGKRADLILLDLRHPQTTPHHHLAATIVFQAYGNEVDTVLIDGNVVMENRRLSFLPPERELAFLEEAQSRATAILQRANMVANPAWRSL

SEQ ID NO: 344 - protein, 473 aa, Artificial Sequence
  Description of Artificial Sequence: Synthetic peptide
MQTLSIQHGTLVTMDQYRRVLGDSWVHVQDGRIVALGVHAESVPPPADRVIDARGKVVLPGFINAHTHVNQILLRGGPSHGRQFYDWLFNVVYPGQKAMRPEVAVAVRLYCAEAVRSGITTINEEADSAIYPGNIEAAMAVYGEVGVRVVYARMFFDRMDGRIQGYVDALKARSPQVELCSIMEETAVAKDRITALSDQYHGTAGGRISVWPAPATTTTVTVEGMRWAQAFARDRAVMWTLHMAESDHDERIIGWSPAEYMECYGLLDERLQVAHCVYFDRKDVRLLHRHNVKVASQVVSNAYLGSGVAPVPEMVERGMAVGIGTDNNNSSDSVNMIGDMKFMAHIHRAVHRDADVLTPEKILEMATIDGARSLGMDHEIGSIETGKRADLILLDLRHPQTTPHHHLAATIVFQAYGNEVDTVLIDGNVVMENRRLSFLPPERELAFLEEAQSRATAILQRANMVANPAWRSL

SEQ ID NO: 345 - protein, 473 aa, Artificial Sequence
  Description of Artificial Sequence: Synthetic peptide
MQTLSIQHGTLVTMDQYRRVLGDSWVHVQDGRIVALGVHAESVPPPADRVIDARGKVVLPGFINAHTHVNQILLRGGPSHGRQFYDWLFNVVYPGQKAMRPEVAVAVRLYCAEAVRSGITTINEEADSAIYPGNIEAAMAVYGEVGVRVVYARMFFDRMDGRIQGYVDALKARSPQVELCSIMEETAVAKDRITALSDQYHGTAGGRISVWPAPATTTTVTVEGMRWAQAFARDRAVMWTLHMAESDHDERILGGSPAEYMECYGLLDERLQVAHCVYFDRKDVRLLHRHNVKVASQVVSNAYLGSGVAPVPEMVERGMAVGIGTDNDNSCDSVNMIGDMKFMAHIHRAVHRDADVLTPEKILEMATIDGARSLGMDHEIGSIETGKRADLILLDLRHPQTTPHHHLAATIVFQAYGNEVDTVLIDGNVVMENRRLSFLPPERELAFLEEAQSRATAILQRANMVANPAWRSL

SEQ ID NO: 346 - protein, 473 aa, Artificial Sequence
  Description of Artificial Sequence: Synthetic peptide
MQTLSIQHGTLVTMDQYRRVLGDSWVHVQDGRIVALGVHAESVPPPADRVIDARGKVVLPGFINAHTHVNQILLRGGPSHGRQFYDWLFNVVYPGQKAMRPEVAVAVRLYCAEAVRSGITTINEEADSAIYPGNIEAAMAVYGEVGVRVVYARMFFDRMDGRIQGYVDALKARSPQVELCSIMEETAVAKDRITALSDQYHGTAGGRISVWPAPATTTTVTVEGMRWAQAFARDRAVMWTLHMAESDHDERILGGSPAEYMECYGLLDERLQVAHCVYFDRKDVRLLHRHNVKVASQVVSNAYLGSGVAPVPEMVERGMAVGIGTDNDNSSDSVNMIGDMKFMAHIHRAVHRDADVLTPEKILEMATIDGARSLGMDHEIGSIETGKRADLILLDLRHPQTTPHHHLAATIVFQAYGNEVDTVLIDGNVVMENRRLSFLPPERELAFLEEAQSRATAILQRANMVANPAWRSL

SEQ ID NO: 347 - protein, 473 aa, Artificial Sequence
  Description of Artificial Sequence: Synthetic peptide
MQTLSIQHGTLVTMDQYRRVLGDSWVHVQDGRIVALGVHAESVPPPADRVIDARGKVVLPGFINAHTHVNQILLRGGPSHGRQFYDWLFNVVYPGQKAMRPEVAVAVRLYCAEAVRSGITTINEEADSAIYPGNIEAAMAVYGEVGVRVVYARMFFDRMDGRIQGYVDALKARSPQVELCSIMEETAVAKDRITALSDQYHGTAGGRISVWPAPATTTTVTVEGMRWAQAFARDRAVMWTLHMAESDHDERILGGSPAEYMECYGLLDERLQVAHCVYFDRKDVRLLHRHNVKVASQVVSNAYLGSGVAPVPEMVERGMAVGIGTDNNNSCDSVNMIGDMKFMAHIHRAVHRDADVLTPEKILEMATIDGARSLGMDHEIGSIETGKRADLILLDLRHPQTTPHHHLAATIVFQAYGNEVDTVLIDGNVVMENRRLSFLPPERELAFLEEAQSRATAILQRANMVANPAWRSL

SEQ ID NO: 348 - protein, 473 aa, Artificial Sequence
  Description of Artificial Sequence: Synthetic peptide
MQTLSIQHGTLVTMDQYRRVLGDSWVHVQDGRIVALGVHAESVPPPADRVIDARGKVVLPGFINAHTHVNQILLRGGPSHGRQFYDWLFNVVYPGQKAMRPEVAVAVRLYCAEAVRSGITTINEEADSAIYPGNIEAAMAVYGEVGVRVVYARMFFDRMDGRIQGYVDALKARSPQVELCSIMEETAVAKDRITALSDQYHGTAGGRISVWPAPATTTTVTVEGMRWAQAFARDRAVMWTLHMAESDHDERILGGSPAEYMECYGLLDERLQVAHCVYFDRKDVRLLHRHNVKVASQVVSNAYLGSGVAPVPEMVERGMAVGIGTDNNNSSDSVNMIGDMKFMAHIHRAVHRDADVLTPEKILEMATIDGARSLGMDHEIGSIETGKRADLILLDLRHPQTTPHHHLAATIVFQAYGNEVDTVLIDGNVVMENRRLSFLPPERELAFLEEAQSRATAILQRANMVANPAWRSL

SEQ ID NO: 349 - protein, 473 aa, Artificial Sequence
  Description of Artificial Sequence: Synthetic peptide
MQTLSIQHGTLVTMDQYRRVLGDSWVHVQDGRIVALGVHAESVPPPADRVIDARGKVVLPGFINAHTHVNQILLRGGPSHGRQFYDWLFNVVYPGQKAMRPEVAVAVRLYCAEAVRSGITTINEEADSAIYPGNIEAAMAVYGEVGVRVVYARMFFDRMDGRIQGYVDALKARSPQVELCSIMEETAVAKDRITALSDQYHGTAGGRISVWPAPATTTTVTVEGMRWAQAFARDRAVMWTLHMAESDHDERILGWSPAEYMECYGLLDERLQVAHCVYFDRKDVRLLHRHNVKVASQVVSNAYLGSGVAPVPEMVERGMAVGIGTDNDNSCDSVNMIGDMKFMAHIHRAVHRDADVLTPEKILEMATIDGARSLGMDHEIGSIETGKRADLILLDLRHPQTTPHHHLAATIVFQAYGNEVDTVLIDGNVVMENRRLSFLPPERELAFLEEAQSRATAILQRANMVANPAWRSL

SEQ ID NO: 350 - protein, 473 aa, Artificial Sequence
  Description of Artificial Sequence: Synthetic peptide
MQTLSIQHGTLVTMDQYRRVLGDSWVHVQDGRIVALGVHAESVPPPADRVIDARGKVVLPGFINAHTHVNQILLRGGPSHGRQFYDWLFNVVYPGQKAMRPEVAVAVRLYCAEAVRSGITTINEEADSAIYPGNIEAAMAVYGEVGVRVVYARMFFDRMDGRIQGYVDALKARSPQVELCSIMEETAVAKDRITALSDQYHGTAGGRISVWPAPATTTTVTVEGMRWAQAFARDRAVMWTLHMAESDHDERILGWSPAEYMECYGLLDERLQVAHCVYFDRKDVRLLHRHNVKVASQVVSNAYLGSGVAPVPEMVERGMAVGIGTDNDNSSDSVNMIGDMKFMAHIHRAVHRDADVLTPEKILEMATIDGARSLGMDHEIGSIETGKRADLILLDLRHPQTTPHHHLAATIVFQAYGNEVDTVLIDGNVVMENRRLSFLPPERELAFLEEAQSRATAILQRANMVANPAWRSL

SEQ ID NO: 351 - protein, 473 aa, Artificial Sequence
  Description of Artificial Sequence: Synthetic peptide
MQTLSIQHGTLVTMDQYRRVLGDSWVHVQDGRIVALGVHAESVPPPADRVIDARGKVVLPGFINAHTHVNQILLRGGPSHGRQFYDWLFNVVYPGQKAMRPEVAVAVRLYCAEAVRSGITTINEEADSAIYPGNIEAAMAVYGEVGVRVVYARMFFDRMDGRIQGYVDALKARSPQVELCSIMEETAVAKDRITALSDQYHGTAGGRISVWPAPATTTTVTVEGMRWAQAFARDRAVMWTLHMAESDHDERILGWSPAEYMECYGLLDERLQVAHCVYFDRKDVRLLHRHNVKVASQVVSNAYLGSGVAPVPEMVERGMAVGIGTDNNNSCDSVNMIGDMKFMAHIHRAVHRDADVLTPEKILEMATIDGARSLGMDHEIGSIETGKRADLILLDLRHPQTTPHHHLAATIVFQAYGNEVDTVLIDGNVVMENRRLSFLPPERELAFLEEAQSRATAILQRANMVANPAWRSL

SEQ ID NO: 352 - protein, 473 aa, Artificial Sequence
  Description of Artificial Sequence: Synthetic peptide
MQTLSIQHGTLVTMDQYRRVLGDSWVHVQDGRIVALGVHAESVPPPADRVIDARGKVVLPGFINAHTHVNQILLRGGPSHGRQFYDWLFNVVYPGQKAMRPEVAVAVRLYCAEAVRSGITTINEEADSAIYPGNIEAAMAVYGEVGVRVVYARMFFDRMDGRIQGYVDALKARSPQVELCSIMEETAVAKDRITALSDQYHGTAGGRISVWPAPATTTTVTVEGMRWAQAFARDRAVMWTLHMAESDHDERILGWSPAEYMECYGLLDERLQVAHCVYFDRKDVRLLHRHNVKVASQVVSNAYLGSGVAPVPEMVERGMAVGIGTDNNNSSDSVNMIGDMKFMAHIHRAVHRDADVLTPEKILEMATIDGARSLGMDHEIGSIETGKRADLILLDLRHPQTTPHHHLAATIVFQAYGNEVDTVLIDGNVVMENRRLSFLPPERELAFLEEAQSRATAILQRANMVANPAWRSL

SEQ ID NO: 353 - protein, 473 aa, Artificial Sequence
  Description of Artificial Sequence: Synthetic peptide
MQTLSIQHGTLVTMDQYRRVLGDSWVHVQDGRIVALGVHAESVPPPADRVIDARGKVVLPGFINAHTHVNQILLRGGPSHGRQLYDWLFNVLYPGQKAMRPEVAVAVRLYCAEAVRSGITTINEDADSAIYPGNIEAAMAVYGEVGVRVVYARMFFDRMDGRIQGYVDALKARSPQVELCSIMEETAVAKDRITALSDQYHGTAGGRISVWPAPATITPVTVEGMRWAQAFARDRAVMWTLHMAESDHDERIIGGSPAEYMECYGLLDERLQVAHCVYFDRKDVRLLHRHNVKVASQVVSNAYLGSGVAPVPEMVERGMAVGIGTDNDNSCDSVNMIGDMKFMAHIHRAVHRDADVLTPEKILEMATIDGARSLGMDHEIGSIETGKRADLILLDLRHPQTTPHHHLAATIVFQAYGNEVDTVLIDGNVVMENRRLSFLPPERELAFLEEAQSRATAILQRANMVANPAWRSL

SEQ ID NO: 354 - protein, 473 aa, Artificial Sequence
  Description of Artificial Sequence: Synthetic peptide
MQTLSIQHGTLVTMDQYRRVLGDSWVHVQDGRIVALGVHAESVPPPADRVIDARGKVVLPGFINAHTHVNQILLRGGPSHGRQLYDWLFNVLYPGQKAMRPEVAVAVRLYCAEAVRSGITTINEDADSAIYPGNIEAAMAVYGEVGVRVVYARMFFDRMDGRIQGYVDALKARSPQVELCSIMEETAVAKDRITALSDQYHGTAGGRISVWPAPATITPVTVEGMRWAQAFARDRAVMWTLHMAESDHDERIIGGSPAEYMECYGLLDERLQVAHCVYFDRKDVRLLHRHNVKVASQVVSNAYLGSGVAPVPEMVERGMAVGIGTDNDNSSDSVNMIGDMKFMAHIHRAVHRDADVLTPEKILEMATIDGARSLGMDHEIGSIETGKRADLILLDLRHPQTTPHHHLAATIVFQAYGNEVDTVLIDGNVVMENRRLSFLPPERELAFLEEAQSRATAILQRANMVANPAWRSL

SEQ ID NO: 355 - protein, 473 aa, Artificial Sequence
  Description of Artificial Sequence: Synthetic peptide
MQTLSIQHGTLVTMDQYRRVLGDSWVHVQDGRIVALGVHAESVPPPADRVIDARGKVVLPGFINAHTHVNQILLRGGPSHGRQLYDWLFNVLYPGQKAMRPEVAVAVRLYCAEAVRSGITTINEDADSAIYPGNIEAAMAVYGEVGVRVVYARMFFDRMDGRIQGYVDALKARSPQVELCSIMEETAVAKDRITALSDQYHGTAGGRISVWPAPATITPVTVEGMRWAQAFARDRAVMWTLHMAESDHDERIIGGSPAEYMECYGLLDERLQVAHCVYFDRKDVRLLHRHNVKVASQVVSNAYLGSGVAPVPEMVERGMAVGIGTDNNNSCDSVNMIGDMKFMAHIHRAVHRDADVLTPEKILEMATIDGARSLGMDHEIGSIETGKRADLILLDLRHPQTTPHHHLAATIVFQAYGNEVDTVLIDGNVVMENRRLSFLPPERELAFLEEAQSRATAILQRANMVANPAWRSL

SEQ ID NO: 356 - protein, 473 aa, Artificial Sequence
  Description of Artificial Sequence: Synthetic peptide
MQTLSIQHGTLVTMDQYRRVLGDSWVHVQDGRIVALGVHAESVPPPADRVIDARGKVVLPGFINAHTHVNQILLRGGPSHGRQLYDWLFNVLYPGQKAMRPEVAVAVRLYCAEAVRSGITTINEDADSAIYPGNIEAAMAVYGEVGVRVVYARMFFDRMDGRIQGYVDALKARSPQVELCSIMEETAVAKDRITALSDQYHGTAGGRISVWPAPATITPVTVEGMRWAQAFARDRAVMWTLHMAESDHDERIIGGSPAEYMECYGLLDERLQVAHCVYFDRKDVRLLHRHNVKVASQVVSNAYLGSGVAPVPEMVERGMAVGIGTDNNNSSDSVNMIGDMKFMAHIHRAVHRDADVLTPEKILEMATIDGARSLGMDHEIGSIETGKRADLILLDLRHPQTTPHHHLAATIVFQAYGNEVDTVLIDGNVVMENRRLSFLPPERELAFLEEAQSRATAILQRANMVANPAWRSL

SEQ ID NO: 357 - protein, 473 aa, Artificial Sequence
  Description of Artificial Sequence: Synthetic peptide
MQTLSIQHGTLVTMDQYRRVLGDSWVHVQDGRIVALGVHAESVPPPADRVIDARGKVVLPGFINAHTHVNQILLRGGPSHGRQLYDWLFNVLYPGQKAMRPEVAVAVRLYCAEAVRSGITTINEDADSAIYPGNIEAAMAVYGEVGVRVVYARMFFDRMDGRIQGYVDALKARSPQVELCSIMEETAVAKDRITALSDQYHGTAGGRISVWPAPATITPVTVEGMRWAQAFARDRAVMWTLHMAESDHDERIIGWSPAEYMECYGLLDERLQVAHCVYFDRKDVRLLHRHNVKVASQVVSNAYLGSGVAPVPEMVERGMAVGIGTDNDNSCDSVNMIGDMKFMAHIHRAVHRDADVLTPEKILEMATIDGARSLGMDHEIGSIETGKRADLILLDLRHPQTTPHHHLAATIVFQAYGNEVDTVLIDGNVVMENRRLSFLPPERELAFLEEAQSRATAILQRANMVANPAWRSL

SEQ ID NO: 358 - protein, 473 aa, Artificial Sequence
  Description of Artificial Sequence: Synthetic peptide
MQTLSIQHGTLVTMDQYRRVLGDSWVHVQDGRIVALGVHAESVPPPADRVIDARGKVVLPGFINAHTHVNQILLRGGPSHGRQLYDWLFNVLYPGQKAMRPEVAVAVRLYCAEAVRSGITTINEDADSAIYPGNIEAAMAVYGEVGVRVVYARMFFDRMDGRIQGYVDALKARSPQVELCSIMEETAVAKDRITALSDQYHGTAGGRISVWPAPATITPVTVEGMRWAQAFARDRAVMWTLHMAESDHDERIIGWSPAEYMECYGLLDERLQVAHCVYFDRKDVRLLHRHNVKVASQVVSNAYLGSGVAPVPEMVERGMAVGIGTDNDNSSDSVNMIGDMKFMAHIHRAVHRDADVLTPEKILEMATIDGARSLGMDHEIGSIETGKRADLILLDLRHPQTTPHHHLAATIVFQAYGNEVDTVLIDGNVVMENRRLSFLPPERELAFLEEAQSRATAILQRANMVANPAWRSL

SEQ ID NO: 359 - protein, 473 aa, Artificial Sequence
  Description of Artificial Sequence: Synthetic peptide
MQTLSIQHGTLVTMDQYRRVLGDSWVHVQDGRIVALGVHAESVPPPADRVIDARGKVVLPGFINAHTHVNQILLRGGPSHGRQLYDWLFNVLYPGQKAMRPEVAVAVRLYCAEAVRSGITTINEDADSAIYPGNIEAAMAVYGEVGVRVVYARMFFDRMDGRIQGYVDALKARSPQVELCSIMEETAVAKDRITALSDQYHGTAGGRISVWPAPATITPVTVEGMRWAQAFARDRAVMWTLHMAESDHDERIIGWSPAEYMECYGLLDERLQVAHCVYFDRKDVRLLHRHNVKVASQVVSNAYLGSGVAPVPEMVERGMAVGIGTDNNNSCDSVNMIGDMKFMAHIHRAVHRDADVLTPEKILEMATIDGARSLGMDHEIGSIETGKRADLILLDLRHPQTTPHHHLAATIVFQAYGNEVDTVLIDGNVVMENRRLSFLPPERELAFLEEAQSRATAILQRANMVANPAWRSL

SEQ ID NO: 360 - protein, 473 aa, Artificial Sequence
  Description of Artificial Sequence: Synthetic peptide
MQTLSIQHGTLVTMDQYRRVLGDSWVHVQDGRIVALGVHAESVPPPADRVIDARGKVVLPGFINAHTHVNQILLRGGPSHGRQLYDWLFNVLYPGQKAMRPEVAVAVRLYCAEAVRSGITTINEDADSAIYPGNIEAAMAVYGEVGVRVVYARMFFDRMDGRIQGYVDALKARSPQVELCSIMEETAVAKDRITALSDQYHGTAGGRISVWPAPATITPVTVEGMRWAQAFARDRAVMWTLHMAESDHDERIIGWSPAEYMECYGLLDERLQVAHCVYFDRKDVRLLHRHNVKVASQVVSNAYLGSGVAPVPEMVERGMAVGIGTDNNNSSDSVNMIGDMKFMAHIHRAVHRDADVLTPEKILEMATIDGARSLGMDHEIGSIETGKRADLILLDLRHPQTTPHHHLAATIVFQAYGNEVDTVLIDGNVVMENRRLSFLPPERELAFLEEAQSRATAILQRANMVANPAWRSL

SEQ ID NO: 361 - protein, 473 aa, Artificial Sequence
  Description of Artificial Sequence: Synthetic peptide
MQTLSIQHGTLVTMDQYRRVLGDSWVHVQDGRIVALGVHAESVPPPADRVIDARGKVVLPGFINAHTHVNQILLRGGPSHGRQLYDWLFNVLYPGQKAMRPEVAVAVRLYCAEAVRSGITTINEDADSAIYPGNIEAAMAVYGEVGVRVVYARMFFDRMDGRIQGYVDALKARSPQVELCSIMEETAVAKDRITALSDQYHGTAGGRISVWPAPATITPVTVEGMRWAQAFARDRAVMWTLHMAESDHDERILGGSPAEYMECYGLLDERLQVAHCVYFDRKDVRLLHRHNVKVASQVVSNAYLGSGVAPVPEMVERGMAVGIGTDNDNSCDSVNMIGDMKFMAHIHRAVHRDADVLTPEKILEMATIDGARSLGMDHEIGSIETGKRADLILLDLRHPQTTPHHHLAATIVFQAYGNEVDTVLIDGNVVMENRRLSFLPPERELAFLEEAQSRATAILQRANMVANPAWRSL

SEQ ID NO: 362 - protein, 473 aa, Artificial Sequence
  Description of Artificial Sequence: Synthetic peptide
MQTLSIQHGTLVTMDQYRRVLGDSWVHVQDGRIVALGVHAESVPPPADRVIDARGKVVLPGFINAHTHVNQILLRGGPSHGRQLYDWLFNVLYPGQKAMRPEVAVAVRLYCAEAVRSGITTINEDADSAIYPGNIEAAMAVYGEVGVRVVYARMFFDRMDGRIQGYVDALKARSPQVELCSIMEETAVAKDRITALSDQYHGTAGGRISVWPAPATITPVTVEGMRWAQAFARDRAVMWTLHMAESDHDERILGGSPAEYMECYGLLDERLQVAHCVYFDRKDVRLLHRHNVKVASQVVSNAYLGSGVAPVPEMVERGMAVGIGTDNDNSSDSVNMIGDMKFMAHIHRAVHRDADVLTPEKILEMATIDGARSLGMDHEIGSIETGKRADLILLDLRHPQTTPHHHLAATIVFQAYGNEVDTVLIDGNVVMENRRLSFLPPERELAFLEEAQSRATAILQRANMVANPAWRSL

SEQ ID NO: 363 - protein, 473 aa, Artificial Sequence
  Description of Artificial Sequence: Synthetic peptide
MQTLSIQHGTLVTMDQYRRVLGDSWVHVQDGRIVALGVHAESVPPPADRVIDARGKVVLPGFINAHTHVNQILLRGGPSHGRQLYDWLFNVLYPGQKAMRPEVAVAVRLYCAEAVRSGITTINEDADSAIYPGNIEAAMAVYGEVGVRVVYARMFFDRMDGRIQGYVDALKARSPQVELCSIMEETAVAKDRITALSDQYHGTAGGRISVWPAPATITPVTVEGMRWAQAFARDRAVMWTLHMAESDHDERILGGSPAEYMECYGLLDERLQVAHCVYFDRKDVRLLHRHNVKVASQVVSNAYLGSGVAPVPEMVERGMAVGIGTDNNNSCDSVNMIGDMKFMAHIHRAVHRDADVLTPEKILEMATIDGARSLGMDHEIGSIETGKRADLILLDLRHPQTTPHHHLAATIVFQAYGNEVDTVLIDGNVVMENRRLSFLPPERELAFLEEAQSRATAILQRANMVANPAWRSL

SEQ ID NO: 364 - protein, 473 aa, Artificial Sequence
  Description of Artificial Sequence: Synthetic peptide
MQTLSIQHGTLVTMDQYRRVLGDSWVHVQDGRIVALGVHAESVPPPADRVIDARGKVVLPGFINAHTHVNQILLRGGPSHGRQLYDWLFNVLYPGQKAMRPEVAVAVRLYCAEAVRSGITTINEDADSAIYPGNIEAAMAVYGEVGVRVVYARMFFDRMDGRIQGYVDALKARSPQVELCSIMEETAVAKDRITALSDQYHGTAGGRISVWPAPATITPVTVEGMRWAQAFARDRAVMWTLHMAESDHDERILGGSPAEYMECYGLLDERLQVAHCVYFDRKDVRLLHRHNVKVASQVVSNAYLGSGVAPVPEMVERGMAVGIGTDNNNSSDSVNMIGDMKFMAHIHRAVHRDADVLTPEKILEMATIDGARSLGMDHEIGSIETGKRADLILLDLRHPQTTPHHHLAATIVFQAYGNEVDTVLIDGNVVMENRRLSFLPPERELAFLEEAQSRATAILQRANMVANPAWRSL

SEQ ID NO: 365 - protein, 473 aa, Artificial Sequence
  Description of Artificial Sequence: Synthetic peptide
MQTLSIQHGTLVTMDQYRRVLGDSWVHVQDGRIVALGVHAESVPPPADRVIDARGKVVLPGFINAHTHVNQILLRGGPSHGRQLYDWLFNVLYPGQKAMRPEVAVAVRLYCAEAVRSGITTINEDADSAIYPGNIEAAMAVYGEVGVRVVYARMFFDRMDGRIQGYVDALKARSPQVELCSIMEETAVAKDRITALSDQYHGTAGGRISVWPAPATITPVTVEGMRWAQAFARDRAVMWTLHMAESDHDERILGWSPAEYMECYGLLDERLQVAHCVYFDRKDVRLLHRHNVKVASQVVSNAYLGSGVAPVPEMVERGMAVGIGTDNDNSCDSVNMIGDMKFMAHIHRAVHRDADVLTPEKILEMATIDGARSLGMDHEIGSIETGKRADLILLDLRHPQTTPHHHLAATIVFQAYGNEVDTVLIDGNVVMENRRLSFLPPERELAFLEEAQSRATAILQRANMVANPAWRSL

SEQ ID NO: 366 - protein, 473 aa, Artificial Sequence
  Description of Artificial Sequence: Synthetic peptide
MQTLSIQHGTLVTMDQYRRVLGDSWVHVQDGRIVALGVHAESVPPPADRVIDARGKVVLPGFINAHTHVNQILLRGGPSHGRQLYDWLFNVLYPGQKAMRPEVAVAVRLYCAEAVRSGITTINEDADSAIYPGNIEAAMAVYGEVGVRVVYARMFFDRMDGRIQGYVDALKARSPQVELCSIMEETAVAKDRITALSDQYHGTAGGRISVWPAPATITPVTVEGMRWAQAFARDRAVMWTLHMAESDHDERILGWSPAEYMECYGLLDERLQVAHCVYFDRKDVRLLHRHNVKVASQVVSNAYLGSGVAPVPEMVERGMAVGIGTDNDNSSDSVNMIGDMKFMAHIHRAVHRDADVLTPEKILEMATIDGARSLGMDHEIGSIETGKRADLILLDLRHPQTTPHHHLAATIVFQAYGNEVDTVLIDGNVVMENRRLSFLPPERELAFLEEAQSRATAILQRANMVANPAWRSL

SEQ ID NO: 367 - protein, 473 aa, Artificial Sequence
  Description of Artificial Sequence: Synthetic peptide
MQTLSIQHGTLVTMDQYRRVLGDSWVHVQDGRIVALGVHAESVPPPADRVIDARGKVVLPGFINAHTHVNQILLRGGPSHGRQLYDWLFNVLYPGQKAMRPEVAVAVRLYCAEAVRSGITTINEDADSAIYPGNIEAAMAVYGEVGVRVVYARMFFDRMDGRIQGYVDALKARSPQVELCSIMEETAVAKDRITALSDQYHGTAGGRISVWPAPATITPVTVEGMRWAQAFARDRAVMWTLHMAESDHDERILGWSPAEYMECYGLLDERLQVAHCVYFDRKDVRLLHRHNVKVASQVVSNAYLGSGVAPVPEMVERGMAVGIGTDNNNSCDSVNMIGDMKFMAHIHRAVHRDADVLTPEKILEMATIDGARSLGMDHEIGSIETGKRADLILLDLRHPQTTPHHHLAATIVFQAYGNEVDTVLIDGNVVMENRRLSFLPPERELAFLEEAQSRATAILQRANMVANPAWRSL

SEQ ID NO: 368 - protein, 473 aa, Artificial Sequence
  Description of Artificial Sequence: Synthetic peptide
MQTLSIQHGTLVTMDQYRRVLGDSWVHVQDGRIVALGVHAESVPPPADRVIDARGKVVLPGFINAHTHVNQILLRGGPSHGRQLYDWLFNVLYPGQKAMRPEVAVAVRLYCAEAVRSGITTINEDADSAIYPGNIEAAMAVYGEVGVRVVYARMFFDRMDGRIQGYVDALKARSPQVELCSIMEETAVAKDRITALSDQYHGTAGGRISVWPAPATITPVTVEGMRWAQAFARDRAVMWTLHMAESDHDERILGWSPAEYMECYGLLDERLQVAHCVYFDRKDVRLLHRHNVKVASQVVSNAYLGSGVAPVPEMVERGMAVGIGTDNNNSSDSVNMIGDMKFMAHIHRAVHRDADVLTPEKILEMATIDGARSLGMDHEIGSIETGKRADLILLDLRHPQTTPHHHLAATIVFQAYGNEVDTVLIDGNVVMENRRLSFLPPERELAFLEEAQSRATAILQRANMVANPAWRSL

SEQ ID NO: 369 - protein, 473 aa, Artificial Sequence
  Description of Artificial Sequence: Synthetic peptide
MQTLSIQHGTLVTMDQYRRVLGDSWVHVQDGRIVALGVHAESVPPPADRVIDARGKVVLPGFINAHTHVNQILLRGGPSHGRQLYDWLFNVLYPGQKAMRPEVAVAVRLYCAEAVRSGITTINEDADSAIYPGNIEAAMAVYGEVGVRVVYARMFFDRMDGRIQGYVDALKARSPQVELCSIMEETAVAKDRITALSDQYHGTAGGRISVWPAPATITTVTVEGMRWAQAFARDRAVMWTLHMAESDHDERIIGGSPAEYMECYGLLDERLQVAHCVYFDRKDVRLLHRHNVKVASQVVSNAYLGSGVAPVPEMVERGMAVGIGTDNDNSCDSVNMIGDMKFMAHIHRAVHRDADVLTPEKILEMATIDGARSLGMDHEIGSIETGKRADLILLDLRHPQTTPHHHLAATIVFQAYGNEVDTVLIDGNVVMENRRLSFLPPERELAFLEEAQSRATAILQRANMVANPAWRSL

SEQ ID NO: 370 - protein, 473 aa, Artificial Sequence
  Description of Artificial Sequence: Synthetic peptide
MQTLSIQHGTLVTMDQYRRVLGDSWVHVQDGRIVALGVHAESVPPPADRVIDARGKVVLPGFINAHTHVNQILLRGGPSHGRQLYDWLFNVLYPGQKAMRPEVAVAVRLYCAEAVRSGITTINEDADSAIYPGNIEAAMAVYGEVGVRVVYARMFFDRMDGRIQGYVDALKARSPQVELCSIMEETAVAKDRITALSDQYHGTAGGRISVWPAPATITTVTVEGMRWAQAFARDRAVMWTLHMAESDHDERIIGGSPAEYMECYGLLDERLQVAHCVYFDRKDVRLLHRHNVKVASQVVSNAYLGSGVAPVPEMVERGMAVGIGTDNDNSSDSVNMIGDMKFMAHIHRAVHRDADVLTPEKILEMATIDGARSLGMDHEIGSIETGKRADLILLDLRHPQTTPHHHLAATIVFQAYGNEVDTVLIDGNVVMENRRLSFLPPERELAFLEEAQSRATAILQRANMVANPAWRSL

SEQ ID NO: 371 - protein, 473 aa, Artificial Sequence
  Description of Artificial Sequence: Synthetic peptide
MQTLSIQHGTLVTMDQYRRVLGDSWVHVQDGRIVALGVHAESVPPPADRVIDARGKVVLPGFINAHTHVNQILLRGGPSHGRQLYDWLFNVLYPGQKAMRPEVAVAVRLYCAEAVRSGITTINEDADSAIYPGNIEAAMAVYGEVGVRVVYARMFFDRMDGRIQGYVDALKARSPQVELCSIMEETAVAKDRITALSDQYHGTAGGRISVWPAPATITTVTVEGMRWAQAFARDRAVMWTLHMAESDHDERIIGGSPAEYMECYGLLDERLQVAHCVYFDRKDVRLLHRHNVKVASQVVSNAYLGSGVAPVPEMVERGMAVGIGTDNNNSCDSVNMIGDMKFMAHIHRAVHRDADVLTPEKILEMATIDGARSLGMDHEIGSIETGKRADLILLDLRHPQTTPHHHLAATIVFQAYGNEVDTVLIDGNVVMENRRLSFLPPERELAFLEEAQSRATAILQRANMVANPAWRSL

SEQ ID NO: 372 - protein, 473 aa, Artificial Sequence
  Description of Artificial Sequence: Synthetic peptide
MQTLSIQHGTLVTMDQYRRVLGDSWVHVQDGRIVALGVHAESVPPPADRVIDARGKVVLPGFINAHTHVNQILLRGGPSHGRQLYDWLFNVLYPGQKAMRPEVAVAVRLYCAEAVRSGITTINEDADSAIYPGNIEAAMAVYGEVGVRVVYARMFFDRMDGRIQGYVDALKARSPQVELCSIMEETAVAKDRITALSDQYHGTAGGRISVWPAPATITTVTVEGMRWAQAFARDRAVMWTLHMAESDHDERIIGGSPAEYMECYGLLDERLQVAHCVYFDRKDVRLLHRHNVKVASQVVSNAYLGSGVAPVPEMVERGMAVGIGTDNNNSSDSVNMIGDMKFMAHIHRAVHRDADVLTPEKILEMATIDGARSLGMDHEIGSIETGKRADLILLDLRHPQTTPHHHLAATIVFQAYGNEVDTVLIDGNVVMENRRLSFLPPERELAFLEEAQSRATAILQRANMVANPAWRSL

SEQ ID NO: 373 - protein, 473 aa, Artificial Sequence
  Description of Artificial Sequence: Synthetic peptide
MQTLSIQHGTLVTMDQYRRVLGDSWVHVQDGRIVALGVHAESVPPPADRVIDARGKVVLPGFINAHTHVNQILLRGGPSHGRQLYDWLFNVLYPGQKAMRPEVAVAVRLYCAEAVRSGITTINEDADSAIYPGNIEAAMAVYGEVGVRVVYARMFFDRMDGRIQGYVDALKARSPQVELCSIMEETAVAKDRITALSDQYHGTAGGRISVWPAPATITTVTVEGMRWAQAFARDRAVMWTLHMAESDHDERIIGWSPAEYMECYGLLDERLQVAHCVYFDRKDVRLLHRHNVKVASQVVSNAYLGSGVAPVPEMVERGMAVGIGTDNDNSCDSVNMIGDMKFMAHIHRAVHRDADVLTPEKILEMATIDGARSLGMDHEIGSIETGKRADLILLDLRHPQTTPHHHLAATIVFQAYGNEVDTVLIDGNVVMENRRLSFLPPERELAFLEEAQSRATAILQRANMVANPAWRSL

SEQ ID NO: 374 - protein, 473 aa, Artificial Sequence
  Description of Artificial Sequence: Synthetic peptide
MQTLSIQHGTLVTMDQYRRVLGDSWVHVQDGRIVALGVHAESVPPPADRVIDARGKVVLPGFINAHTHVNQILLRGGPSHGRQLYDWLFNVLYPGQKAMRPEVAVAVRLYCAEAVRSGITTINEDADSAIYPGNIEAAMAVYGEVGVRVVYARMFFDRMDGRIQGYVDALKARSPQVELCSIMEETAVAKDRITALSDQYHGTAGGRISVWPAPATITTVTVEGMRWAQAFARDRAVMWTLHMAESDHDERIIGWSPAEYMECYGLLDERLQVAHCVYFDRKDVRLLHRHNVKVASQVVSNAYLGSGVAPVPEMVERGMAVGIGTDNDNSSDSVNMIGDMKFMAHIHRAVHRDADVLTPEKILEMATIDGARSLGMDHEIGSIETGKRADLILLDLRHPQTTPHHHLAATIVFQAYGNEVDTVLIDGNVVMENRRLSFLPPERELAFLEEAQSRATAILQRANMVANPAWRSL

SEQ ID NO: 375 - protein, 473 aa, Artificial Sequence
  Description of Artificial Sequence: Synthetic peptide
MQTLSIQHGTLVTMDQYRRVLGDSWVHVQDGRIVALGVHAESVPPPADRVIDARGKVVLPGFINAHTHVNQILLRGGPSHGRQLYDWLFNVLYPGQKAMRPEVAVAVRLYCAEAVRSGITTINEDADSAIYPGNIEAAMAVYGEVGVRVVYARMFFDRMDGRIQGYVDALKARSPQVELCSIMEETAVAKDRITALSDQYHGTAGGRISVWPAPATITTVTVEGMRWAQAFARDRAVMWTLHMAESDHDERIIGWSPAEYMECYGLLDERLQVAHCVYFDRKDVRLLHRHNVKVASQVVSNAYLGSGVAPVPEMVERGMAVGIGTDNNNSCDSVNMIGDMKFMAHIHRAVHRDADVLTPEKILEMATIDGARSLGMDHEIGSIETGKRADLILLDLRHPQTTPHHHLAATIVFQAYGNEVDTVLIDGNVVMENRRLSFLPPERELAFLEEAQSRATAILQRANMVANPAWRSL

SEQ ID NO: 376 - protein, 473 aa, Artificial Sequence
  Description of Artificial Sequence: Synthetic peptide
MQTLSIQHGTLVTMDQYRRVLGDSWVHVQDGRIVALGVHAESVPPPADRVIDARGKVVLPGFINAHTHVNQILLRGGPSHGRQLYDWLFNVLYPGQKAMRPEVAVAVRLYCAEAVRSGITTINEDADSAIYPGNIEAAMAVYGEVGVRVVYARMFFDRMDGRIQGYVDALKARSPQVELCSIMEETAVAKDRITALSDQYHGTAGGRISVWPAPATITTVTVEGMRWAQAFARDRAVMWTLHMAESDHDERIIGWSPAEYMECYGLLDERLQVAHCVYFDRKDVRLLHRHNVKVASQVVSNAYLGSGVAPVPEMVERGMAVGIGTDNNNSSDSVNMIGDMKFMAHIHRAVHRDADVLTPEKILEMATIDGARSLGMDHEIGSIETGKRADLILLDLRHPQTTPHHHLAATIVFQAYGNEVDTVLIDGNVVMENRRLSFLPPERELAFLEEAQSRATAILQRANMVANPAWRSL

SEQ ID NO: 377 - protein, 473 aa, Artificial Sequence
  Description of Artificial Sequence: Synthetic peptide
MQTLSIQHGTLVTMDQYRRVLGDSWVHVQDGRIVALGVHAESVPPPADRVIDARGKVVLPGFINAHTHVNQILLRGGPSHGRQLYDWLFNVLYPGQKAMRPEVAVAVRLYCAEAVRSGITTINEDADSAIYPGNIEAAMAVYGEVGVRVVYARMFFDRMDGRIQGYVDALKARSPQVELCSIMEETAVAKDRITALSDQYHGTAGGRISVWPAPATITTVTVEGMRWAQAFARDRAVMWTLHMAESDHDERILGGSPAEYMECYGLLDERLQVAHCVYFDRKDVRLLHRHNVKVASQVVSNAYLGSGVAPVPEMVERGMAVGIGTDNDNSCDSVNMIGDMKFMAHIHRAVHRDADVLTPEKILEMATIDGARSLGMDHEIGSIETGKRADLILLDLRHPQTTPHHHLAATIVFQAYGNEVDTVLIDGNVVMENRRLSFLPPERELAFLEEAQSRATAILQRANMVANPAWRSL

SEQ ID NO: 378 - protein, 473 aa, Artificial Sequence
  Description of Artificial Sequence: Synthetic peptide
MQTLSIQHGTLVTMDQYRRVLGDSWVHVQDGRIVALGVHAESVPPPADRVIDARGKVVLPGFINAHTHVNQILLRGGPSHGRQLYDWLFNVLYPGQKAMRPEVAVAVRLYCAEAVRSGITTINEDADSAIYPGNIEAAMAVYGEVGVRVVYARMFFDRMDGRIQGYVDALKARSPQVELCSIMEETAVAKDRITALSDQYHGTAGGRISVWPAPATITTVTVEGMRWAQAFARDRAVMWTLHMAESDHDERILGGSPAEYMECYGLLDERLQVAHCVYFDRKDVRLLHRHNVKVASQVVSNAYLGSGVAPVPEMVERGMAVGIGTDNDNSSDSVNMIGDMKFMAHIHRAVHRDADVLTPEKILEMATIDGARSLGMDHEIGSIETGKRADLILLDLRHPQTTPHHHLAATIVFQAYGNEVDTVLIDGNVVMENRRLSFLPPERELAFLEEAQSRATAILQRANMVANPAWRSL

SEQ ID NO: 379 - protein, 473 aa, Artificial Sequence
  Description of Artificial Sequence: Synthetic peptide
MQTLSIQHGTLVTMDQYRRVLGDSWVHVQDGRIVALGVHAESVPPPADRVIDARGKVVLPGFINAHTHVNQILLRGGPSHGRQLYDWLFNVLYPGQKAMRPEVAVAVRLYCAEAVRSGITTINEDADSAIYPGNIEAAMAVYGEVGVRVVYARMFFDRMDGRIQGYVDALKARSPQVELCSIMEETAVAKDRITALSDQYHGTAGGRISVWPAPATITTVTVEGMRWAQAFARDRAVMWTLHMAESDHDERILGGSPAEYMECYGLLDERLQVAHCVYFDRKDVRLLHRHNVKVASQVVSNAYLGSGVAPVPEMVERGMAVGIGTDNNNSCDSVNMIGDMKFMAHIHRAVHRDADVLTPEKILEMATIDGARSLGMDHEIGSIETGKRADLILLDLRHPQTTPHHHLAATIVFQAYGNEVDTVLIDGNVVMENRRLSFLPPERELAFLEEAQSRATAILQRANMVANPAWRSL

SEQ ID NO: 380 - protein, 473 aa, Artificial Sequence
  Description of Artificial Sequence: Synthetic peptide
MQTLSIQHGTLVTMDQYRRVLGDSWVHVQDGRIVALGVHAESVPPPADRVIDARGKVVLPGFINAHTHVNQILLRGGPSHGRQLYDWLFNVLYPGQKAMRPEVAVAVRLYCAEAVRSGITTINEDADSAIYPGNIEAAMAVYGEVGVRVVYARMFFDRMDGRIQGYVDALKARSPQVELCSIMEETAVAKDRITALSDQYHGTAGGRISVWPAPATITTVTVEGMRWAQAFARDRAVMWTLHMAESDHDERILGGSPAEYMECYGLLDERLQVAHCVYFDRKDVRLLHRHNVKVASQVVSNAYLGSGVAPVPEMVERGMAVGIGTDNNNSSDSVNMIGDMKFMAHIHRAVHRDADVLTPEKILEMATIDGARSLGMDHEIGSIETGKRADLILLDLRHPQTTPHHHLAATIVFQAYGNEVDTVLIDGNVVMENRRLSFLPPERELAFLEEAQSRATAILQRANMVANPAWRSL

SEQ ID NO: 381 - protein, 473 aa, Artificial Sequence
  Description of Artificial Sequence: Synthetic peptide
MQTLSIQHGTLVTMDQYRRVLGDSWVHVQDGRIVALGVHAESVPPPADRVIDARGKVVLPGFINAHTHVNQILLRGGPSHGRQLYDWLFNVLYPGQKAMRPEVAVAVRLYCAEAVRSGITTINEDADSAIYPGNIEAAMAVYGEVGVRVVYARMFFDRMDGRIQGYVDALKARSPQVELCSIMEETAVAKDRITALSDQYHGTAGGRISVWPAPATITTVTVEGMRWAQAFARDRAVMWTLHMAESDHDERILGWSPAEYMECYGLLDERLQVAHCVYFDRKDVRLLHRHNVKVASQVVSNAYLGSGVAPVPEMVERGMAVGIGTDNDNSCDSVNMIGDMKFMAHIHRAVHRDADVLTPEKILEMATIDGARSLGMDHEIGSIETGKRADLILLDLRHPQTTPHHHLAATIVFQAYGNEVDTVLIDGNVVMENRRLSFLPPERELAFLEEAQSRATAILQRANMVANPAWRSL

SEQ ID NO: 382 - protein, 473 aa, Artificial Sequence
  Description of Artificial Sequence: Synthetic peptide
MQTLSIQHGTLVTMDQYRRVLGDSWVHVQDGRIVALGVHAESVPPPADRVIDARGKVVLPGFINAHTHVNQILLRGGPSHGRQLYDWLFNVLYPGQKAMRPEVAVAVRLYCAEAVRSGITTINEDADSAIYPGNIEAAMAVYGEVGVRVVYARMFFDRMDGRIQGYVDALKARSPQVELCSIMEETAVAKDRITALSDQYHGTAGGRISVWPAPATITTVTVEGMRWAQAFARDRAVMWTLHMAESDHDERILGWSPAEYMECYGLLDERLQVAHCVYFDRKDVRLLHRHNVKVASQVVSNAYLGSGVAPVPEMVERGMAVGIGTDNDNSSDSVNMIGDMKFMAHIHRAVHRDADVLTPEKILEMATIDGARSLGMDHEIGSIETGKRADLILLDLRHPQTTPHHHLAATIVFQAYGNEVDTVLIDGNVVMENRRLSFLPPERELAFLEEAQSRATAILQRANMVANPAWRSL

SEQ ID NO: 383 - protein, 473 aa, Artificial Sequence
  Description of Artificial Sequence: Synthetic peptide
MQTLSIQHGTLVTMDQYRRVLGDSWVHVQDGRIVALGVHAESVPPPADRVIDARGKVVLPGFINAHTHVNQILLRGGPSHGRQLYDWLFNVLYPGQKAMRPEVAVAVRLYCAEAVRSGITTINEDADSAIYPGNIEAAMAVYGEVGVRVVYARMFFDRMDGRIQGYVDALKARSPQVELCSIMEETAVAKDRITALSDQYHGTAGGRISVWPAPATITTVTVEGMRWAQAFARDRAVMWTLHMAESDHDERILGWSPAEYMECYGLLDERLQVAHCVYFDRKDVRLLHRHNVKVASQVVSNAYLGSGVAPVPEMVERGMAVGIGTDNNNSCDSVNMIGDMKFMAHIHRAVHRDADVLTPEKILEMATIDGARSLGMDHEIGSIETGKRADLILLDLRHPQTTPHHHLAATIVFQAYGNEVDTVLIDGNVVMENRRLSFLPPERELAFLEEAQSRATAILQRANMVANPAWRSL

SEQ ID NO: 384 - protein, 473 aa, Artificial Sequence
  Description of Artificial Sequence: Synthetic peptide
MQTLSIQHGTLVTMDQYRRVLGDSWVHVQDGRIVALGVHAESVPPPADRVIDARGKVVLPGFINAHTHVNQILLRGGPSHGRQLYDWLFNVLYPGQKAMRPEVAVAVRLYCAEAVRSGITTINEDADSAIYPGNIEAAMAVYGEVGVRVVYARMFFDRMDGRIQGYVDALKARSPQVELCSIMEETAVAKDRITALSDQYHGTAGGRISVWPAPATITTVTVEGMRWAQAFARDRAVMWTLHMAESDHDERILGWSPAEYMECYGLLDERLQVAHCVYFDRKDVRLLHRHNVKVASQVVSNAYLGSGVAPVPEMVERGMAVGIGTDNNNSSDSVNMIGDMKFMAHIHRAVHRDADVLTPEKILEMATIDGARSLGMDHEIGSIETGKRADLILLDLRHPQTTPHHHLAATIVFQAYGNEVDTVLIDGNVVMENRRLSFLPPERELAFLEEAQSRATAILQRANMVANPAWRSL

SEQ ID NO: 385 - protein, 473 aa, Artificial Sequence
  Description of Artificial Sequence: Synthetic peptide
MQTLSIQHGTLVTMDQYRRVLGDSWVHVQDGRIVALGVHAESVPPPADRVIDARGKVVLPGFINAHTHVNQILLRGGPSHGRQLYDWLFNVLYPGQKAMRPEVAVAVRLYCAEAVRSGITTINEDADSAIYPGNIEAAMAVYGEVGVRVVYARMFFDRMDGRIQGYVDALKARSPQVELCSIMEETAVAKDRITALSDQYHGTAGGRISVWPAPATTTPVTVEGMRWAQAFARDRAVMWTLHMAESDHDERIIGGSPAEYMECYGLLDERLQVAHCVYFDRKDVRLLHRHNVKVASQVVSNAYLGSGVAPVPEMVERGMAVGIGTDNDNSCDSVNMIGDMKFMAHIHRAVHRDADVLTPEKILEMATIDGARSLGMDHEIGSIETGKRADLILLDLRHPQTTPHHHLAATIVFQAYGNEVDTVLIDGNVVMENRRLSFLPPERELAFLEEAQSRATAILQRANMVANPAWRSL

SEQ ID NO: 386 - protein, 473 aa, Artificial Sequence
  Description of Artificial Sequence: Synthetic peptide
MQTLSIQHGTLVTMDQYRRVLGDSWVHVQDGRIVALGVHAESVPPPADRVIDARGKVVLPGFINAHTHVNQILLRGGPSHGRQLYDWLFNVLYPGQKAMRPEVAVAVRLYCAEAVRSGITTINEDADSAIYPGNIEAAMAVYGEVGVRVVYARMFFDRMDGRIQGYVDALKARSPQVELCSIMEETAVAKDRITALSDQYHGTAGGRISVWPAPATTTPVTVEGMRWAQAFARDRAVMWTLHMAESDHDERIIGGSPAEYMECYGLLDERLQVAHCVYFDRKDVRLLHRHNVKVASQVVSNAYLGSGVAPVPEMVERGMAVGIGTDNDNSSDSVNMIGDMKFMAHIHRAVHRDADVLTPEKILEMATIDGARSLGMDHEIGSIETGKRADLILLDLRHPQTTPHHHLAATIVFQAYGNEVDTVLIDGNVVMENRRLSFLPPERELAFLEEAQSRATAILQRANMVANPAWRSL

SEQ ID NO: 387 - protein, 473 aa, Artificial Sequence
  Description of Artificial Sequence: Synthetic peptide
MQTLSIQHGTLVTMDQYRRVLGDSWVHVQDGRIVALGVHAESVPPPADRVIDARGKVVLPGFINAHTHVNQILLRGGPSHGRQLYDWLFNVLYPGQKAMRPEVAVAVRLYCAEAVRSGITTINEDADSAIYPGNIEAAMAVYGEVGVRVVYARMFFDRMDGRIQGYVDALKARSPQVELCSIMEETAVAKDRITALSDQYHGTAGGRISVWPAPATTTPVTVEGMRWAQAFARDRAVMWTLHMAESDHDERIIGGSPAEYMECYGLLDERLQVAHCVYFDRKDVRLLHRHNVKVASQVVSNAYLGSGVAPVPEMVERGMAVGIGTDNNNSCDSVNMIGDMKFMAHIHRAVHRDADVLTPEKILEMATIDGARSLGMDHEIGSIETGKRADLILLDLRHPQTTPHHHLAATIVFQAYGNEVDTVLIDGNVVMENRRLSFLPPERELAFLEEAQSRATAILQRANMVANPAWRSL

SEQ ID NO: 388 - protein, 473 aa, Artificial Sequence
  Description of Artificial Sequence: Synthetic peptide
MQTLSIQHGTLVTMDQYRRVLGDSWVHVQDGRIVALGVHAESVPPPADRVIDARGKVVLPGFINAHTHVNQILLRGGPSHGRQLYDWLFNVLYPGQKAMRPEVAVAVRLYCAEAVRSGITTINEDADSAIYPGNIEAAMAVYGEVGVRVVYARMFFDRMDGRIQGYVDALKARSPQVELCSIMEETAVAKDRITALSDQYHGTAGGRISVWPAPATTTPVTVEGMRWAQAFARDRAVMWTLHMAESDHDERIIGGSPAEYMECYGLLDERLQVAHCVYFDRKDVRLLHRHNVKVASQVVSNAYLGSGVAPVPEMVERGMAVGIGTDNNNSSDSVNMIGDMKFMAHIHRAVHRDADVLTPEKILEMATIDGARSLGMDHEIGSIETGKRADLILLDLRHPQTTPHHHLAATIVFQAYGNEVDTVLIDGNVVMENRRLSFLPPERELAFLEEAQSRATAILQRANMVANPAWRSL

SEQ ID NO: 389 - protein, 473 aa, Artificial Sequence
  Description of Artificial Sequence: Synthetic peptide
MQTLSIQHGTLVTMDQYRRVLGDSWVHVQDGRIVALGVHAESVPPPADRVIDARGKVVLPGFINAHTHVNQILLRGGPSHGRQLYDWLFNVLYPGQKAMRPEVAVAVRLYCAEAVRSGITTINEDADSAIYPGNIEAAMAVYGEVGVRVVYARMFFDRMDGRIQGYVDALKARSPQVELCSIMEETAVAKDRITALSDQYHGTAGGRISVWPAPATTTPVTVEGMRWAQAFARDRAVMWTLHMAESDHDERIIGWSPAEYMECYGLLDERLQVAHCVYFDRKDVRLLHRHNVKVASQVVSNAYLGSGVAPVPEMVERGMAVGIGTDNDNSCDSVNMIGDMKFMAHIHRAVHRDADVLTPEKILEMATIDGARSLGMDHEIGSIETGKRADLILLDLRHPQTTPHHHLAATIVFQAYGNEVDTVLIDGNVVMENRRLSFLPPERELAFLEEAQSRATAILQRANMVANPAWRSL

SEQ ID NO: 390 - protein, 473 aa, Artificial Sequence
  Description of Artificial Sequence: Synthetic peptide
MQTLSIQHGTLVTMDQYRRVLGDSWVHVQDGRIVALGVHAESVPPPADRVIDARGKVVLPGFINAHTHVNQILLRGGPSHGRQLYDWLFNVLYPGQKAMRPEVAVAVRLYCAEAVRSGITTINEDADSAIYPGNIEAAMAVYGEVGVRVVYARMFFDRMDGRIQGYVDALKARSPQVELCSIMEETAVAKDRITALSDQYHGTAGGRISVWPAPATTTPVTVEGMRWAQAFARDRAVMWTLHMAESDHDERIIGWSPAEYMECYGLLDERLQVAHCVYFDRKDVRLLHRHNVKVASQVVSNAYLGSGVAPVPEMVERGMAVGIGTDNDNSSDSVNMIGDMKFMAHIHRAVHRDADVLTPEKILEMATIDGARSLGMDHEIGSIETGKRADLILLDLRHPQTTPHHHLAATIVFQAYGNEVDTVLIDGNVVMENRRLSFLPPERELAFLEEAQSRATAILQRANMVANPAWRSL

SEQ ID NO: 391 - protein, 473 aa, Artificial Sequence
  Description of Artificial Sequence: Synthetic peptide
MQTLSIQHGTLVTMDQYRRVLGDSWVHVQDGRIVALGVHAESVPPPADRVIDARGKVVLPGFINAHTHVNQILLRGGPSHGRQLYDWLFNVLYPGQKAMRPEVAVAVRLYCAEAVRSGITTINEDADSAIYPGNIEAAMAVYGEVGVRVVYARMFFDRMDGRIQGYVDALKARSPQVELCSIMEETAVAKDRITALSDQYHGTAGGRISVWPAPATTTPVTVEGMRWAQAFARDRAVMWTLHMAESDHDERIIGWSPAEYMECYGLLDERLQVAHCVYFDRKDVRLLHRHNVKVASQVVSNAYLGSGVAPVPEMVERGMAVGIGTDNNNSCDSVNMIGDMKFMAHIHRAVHRDADVLTPEKILEMATIDGARSLGMDHEIGSIETGKRADLILLDLRHPQTTPHHHLAATIVFQAYGNEVDTVLIDGNVVMENRRLSFLPPERELAFLEEAQSRATAILQRANMVANPAWRSL

SEQ ID NO: 392 - protein, 473 aa, Artificial Sequence
  Description of Artificial Sequence: Synthetic peptide
MQTLSIQHGTLVTMDQYRRVLGDSWVHVQDGRIVALGVHAESVPPPADRVIDARGKVVLPGFINAHTHVNQILLRGGPSHGRQLYDWLFNVLYPGQKAMRPEVAVAVRLYCAEAVRSGITTINEDADSAIYPGNIEAAMAVYGEVGVRVVYARMFFDRMDGRIQGYVDALKARSPQVELCSIMEETAVAKDRITALSDQYHGTAGGRISVWPAPATTTPVTVEGMRWAQAFARDRAVMWTLHMAESDHDERIIGWSPAEYMECYGLLDERLQVAHCVYFDRKDVRLLHRHNVKVASQVVSNAYLGSGVAPVPEMVERGMAVGIGTDNNNSSDSVNMIGDMKFMAHIHRAVHRDADVLTPEKILEMATIDGARSLGMDHEIGSIETGKRADLILLDLRHPQTTPHHHLAATIVFQAYGNEVDTVLIDGNVVMENRRLSFLPPERELAFLEEAQSRATAILQRANMVANPAWRSL

SEQ ID NO: 393 - protein, 473 aa, Artificial Sequence
  Description of Artificial Sequence: Synthetic peptide
MQTLSIQHGTLVTMDQYRRVLGDSWVHVQDGRIVALGVHAESVPPPADRVIDARGKVVLPGFINAHTHVNQILLRGGPSHGRQLYDWLFNVLYPGQKAMRPEVAVAVRLYCAEAVRSGITTINEDADSAIYPGNIEAAMAVYGEVGVRVVYARMFFDRMDGRIQGYVDALKARSPQVELCSIMEETAVAKDRITALSDQYHGTAGGRISVWPAPATTTPVTVEGMRWAQAFARDRAVMWTLHMAESDHDERILGGSPAEYMECYGLLDERLQVAHCVYFDRKDVRLLHRHNVKVASQVVSNAYLGSGVAPVPEMVERGMAVGIGTDNDNSCDSVNMIGDMKFMAHIHRAVHRDADVLTPEKILEMATIDGARSLGMDHEIGSIETGKRADLILLDLRHPQTTPHHHLAATIVFQAYGNEVDTVLIDGNVVMENRRLSFLPPERELAFLEEAQSRATAILQRANMVANPAWRSL

SEQ ID NO: 394 - protein, 473 aa, Artificial Sequence
  Description of Artificial Sequence: Synthetic peptide
MQTLSIQHGTLVTMDQYRRVLGDSWVHVQDGRIVALGVHAESVPPPADRVIDARGKVVLPGFINAHTHVNQILLRGGPSHGRQLYDWLFNVLYPGQKAMRPEVAVAVRLYCAEAVRSGITTINEDADSAIYPGNIEAAMAVYGEVGVRVVYARMFFDRMDGRIQGYVDALKARSPQVELCSIMEETAVAKDRITALSDQYHGTAGGRISVWPAPATTTPVTVEGMRWAQAFARDRAVMWTLHMAESDHDERILGGSPAEYMECYGLLDERLQVAHCVYFDRKDVRLLHRHNVKVASQVVSNAYLGSGVAPVPEMVERGMAVGIGTDNDNSSDSVNMIGDMKFMAHIHRAVHRDADVLTPEKILEMATIDGARSLGMDHEIGSIETGKRADLILLDLRHPQTTPHHHLAATIVFQAYGNEVDTVLIDGNVVMENRRLSFLPPERELAFLEEAQSRATAILQRANMVANPAWRSL

SEQ ID NO: 395 - protein, 473 aa, Artificial Sequence
  Description of Artificial Sequence: Synthetic peptide
MQTLSIQHGTLVTMDQYRRVLGDSWVHVQDGRIVALGVHAESVPPPADRVIDARGKVVLPGFINAHTHVNQILLRGGPSHGRQLYDWLFNVLYPGQKAMRPEVAVAVRLYCAEAVRSGITTINEDADSAIYPGNIEAAMAVYGEVGVRVVYARMFFDRMDGRIQGYVDALKARSPQVELCSIMEETAVAKDRITALSDQYHGTAGGRISVWPAPATTTPVTVEGMRWAQAFARDRAVMWTLHMAESDHDERILGGSPAEYMECYGLLDERLQVAHCVYFDRKDVRLLHRHNVKVASQVVSNAYLGSGVAPVPEMVERGMAVGIGTDNNNSCDSVNMIGDMKFMAHIHRAVHRDADVLTPEKILEMATIDGARSLGMDHEIGSIETGKRADLILLDLRHPQTTPHHHLAATIVFQAYGNEVDTVLIDGNVVMENRRLSFLPPERELAFLEEAQSRATAILQRANMVANPAWRSL

SEQ ID NO: 396 - protein, 473 aa, Artificial Sequence
  Description of Artificial Sequence: Synthetic peptide
MQTLSIQHGTLVTMDQYRRVLGDSWVHVQDGRIVALGVHAESVPPPADRVIDARGKVVLPGFINAHTHVNQILLRGGPSHGRQLYDWLFNVLYPGQKAMRPEVAVAVRLYCAEAVRSGITTINEDADSAIYPGNIEAAMAVYGEVGVRVVYARMFFDRMDGRIQGYVDALKARSPQVELCSIMEETAVAKDRITALSDQYHGTAGGRISVWPAPATTTPVTVEGMRWAQAFARDRAVMWTLHMAESDHDERILGGSPAEYMECYGLLDERLQVAHCVYFDRKDVRLLHRHNVKVASQVVSNAYLGSGVAPVPEMVERGMAVGIGTDNNNSSDSVNMIGDMKFMAHIHRAVHRDADVLTPEKILEMATIDGARSLGMDHEIGSIETGKRADLILLDLRHPQTTPHHHLAATIVFQAYGNEVDTVLIDGNVVMENRRLSFLPPERELAFLEEAQSRATAILQRANMVANPAWRSL

SEQ ID NO: 397 - protein, 473 aa, Artificial Sequence
  Description of Artificial Sequence: Synthetic peptide
MQTLSIQHGTLVTMDQYRRVLGDSWVHVQDGRIVALGVHAESVPPPADRVIDARGKVVLPGFINAHTHVNQILLRGGPSHGRQLYDWLFNVLYPGQKAMRPEVAVAVRLYCAEAVRSGITTINEDADSAIYPGNIEAAMAVYGEVGVRVVYARMFFDRMDGRIQGYVDALKARSPQVELCSIMEETAVAKDRITALSDQYHGTAGGRISVWPAPATTTPVTVEGMRWAQAFARDRAVMWTLHMAESDHDERILGWSPAEYMECYGLLDERLQVAHCVYFDRKDVRLLHRHNVKVASQVVSNAYLGSGVAPVPEMVERGMAVGIGTDNDNSCDSVNMIGDMKFMAHIHRAVHRDADVLTPEKILEMATIDGARSLGMDHEIGSIETGKRADLILLDLRHPQTTPHHHLAATIVFQAYGNEVDTVLIDGNVVMENRRLSFLPPERELAFLEEAQSRATAILQRANMVANPAWRSL

SEQ ID NO: 398 - protein, 473 aa, Artificial Sequence
  Description of Artificial Sequence: Synthetic peptide
MQTLSIQHGTLVTMDQYRRVLGDSWVHVQDGRIVALGVHAESVPPPADRVIDARGKVVLPGFINAHTHVNQILLRGGPSHGRQLYDWLFNVLYPGQKAMRPEVAVAVRLYCAEAVRSGITTINEDADSAIYPGNIEAAMAVYGEVGVRVVYARMFFDRMDGRIQGYVDALKARSPQVELCSIMEETAVAKDRITALSDQYHGTAGGRISVWPAPATTTPVTVEGMRWAQAFARDRAVMWTLHMAESDHDERILGWSPAEYMECYGLLDERLQVAHCVYFDRKDVRLLHRHNVKVASQVVSNAYLGSGVAPVPEMVERGMAVGIGTDNDNSSDSVNMIGDMKFMAHIHRAVHRDADVLTPEKILEMATIDGARSLGMDHEIGSIETGKRADLILLDLRHPQTTPHHHLAATIVFQAYGNEVDTVLIDGNVVMENRRLSFLPPERELAFLEEAQSRATAILQRANMVANPAWRSL

SEQ ID NO: 399 - protein, 473 aa, Artificial Sequence
  Description of Artificial Sequence: Synthetic peptide
MQTLSIQHGTLVTMDQYRRVLGDSWVHVQDGRIVALGVHAESVPPPADRVIDARGKVVLPGFINAHTHVNQILLRGGPSHGRQLYDWLFNVLYPGQKAMRPEVAVAVRLYCAEAVRSGITTINEDADSAIYPGNIEAAMAVYGEVGVRVVYARMFFDRMDGRIQGYVDALKARSPQVELCSIMEETAVAKDRITALSDQYHGTAGGRISVWPAPATTTPVTVEGMRWAQAFARDRAVMWTLHMAESDHDERILGWSPAEYMECYGLLDERLQVAHCVYFDRKDVRLLHRHNVKVASQVVSNAYLGSGVAPVPEMVERGMAVGIGTDNNNSCDSVNMIGDMKFMAHIHRAVHRDADVLTPEKILEMATIDGARSLGMDHEIGSIETGKRADLILLDLRHPQTTPHHHLAATIVFQAYGNEVDTVLIDGNVVMENRRLSFLPPERELAFLEEAQSRATAILQRANMVANPAWRSL

SEQ ID NO: 400 - protein, 473 aa, Artificial Sequence
  Description of Artificial Sequence: Synthetic peptide
MQTLSIQHGTLVTMDQYRRVLGDSWVHVQDGRIVALGVHAESVPPPADRVIDARGKVVLPGFINAHTHVNQILLRGGPSHGRQLYDWLFNVLYPGQKAMRPEVAVAVRLYCAEAVRSGITTINEDADSAIYPGNIEAAMAVYGEVGVRVVYARMFFDRMDGRIQGYVDALKARSPQVELCSIMEETAVAKDRITALSDQYHGTAGGRISVWPAPATTTPVTVEGMRWAQAFARDRAVMWTLHMAESDHDERILGWSPAEYMECYGLLDERLQVAHCVYFDRKDVRLLHRHNVKVASQVVSNAYLGSGVAPVPEMVERGMAVGIGTDNNNSSDSVNMIGDMKFMAHIHRAVHRDADVLTPEKILEMATIDGARSLGMDHEIGSIETGKRADLILLDLRHPQTTPHHHLAATIVFQAYGNEVDTVLIDGNVVMENRRLSFLPPERELAFLEEAQSRATAILQRANMVANPAWRSL

SEQ ID NO: 401 - protein, 473 aa, Artificial Sequence
  Description of Artificial Sequence: Synthetic peptide
MQTLSIQHGTLVTMDQYRRVLGDSWVHVQDGRIVALGVHAESVPPPADRVIDARGKVVLPGFINAHTHVNQILLRGGPSHGRQLYDWLFNVLYPGQKAMRPEVAVAVRLYCAEAVRSGITTINEDADSAIYPGNIEAAMAVYGEVGVRVVYARMFFDRMDGRIQGYVDALKARSPQVELCSIMEETAVAKDRITALSDQYHGTAGGRISVWPAPATTTTVTVEGMRWAQAFARDRAVMWTLHMAESDHDERIIGGSPAEYMECYGLLDERLQVAHCVYFDRKDVRLLHRHNVKVASQVVSNAYLGSGVAPVPEMVERGMAVGIGTDNDNSCDSVNMIGDMKFMAHIHRAVHRDADVLTPEKILEMATIDGARSLGMDHEIGSIETGKRADLILLDLRHPQTTPHHHLAATIVFQAYGNEVDTVLIDGNVVMENRRLSFLPPERELAFLEEAQSRATAILQRANMVANPAWRSL

SEQ ID NO: 402 - protein, 473 aa, Artificial Sequence
  Description of Artificial Sequence: Synthetic peptide
MQTLSIQHGTLVTMDQYRRVLGDSWVHVQDGRIVALGVHAESVPPPADRVIDARGKVVLPGFINAHTHVNQILLRGGPSHGRQLYDWLFNVLYPGQKAMRPEVAVAVRLYCAEAVRSGITTINEDADSAIYPGNIEAAMAVYGEVGVRVVYARMFFDRMDGRIQGYVDALKARSPQVELCSIMEETAVAKDRITALSDQYHGTAGGRISVWPAPATTTTVTVEGMRWAQAFARDRAVMWTLHMAESDHDERIIGGSPAEYMECYGLLDERLQVAHCVYFDRKDVRLLHRHNVKVASQVVSNAYLGSGVAPVPEMVERGMAVGIGTDNDNSSDSVNMIGDMKFMAHIHRAVHRDADVLTPEKILEMATIDGARSLGMDHEIGSIETGKRADLILLDLRHPQTTPHHHLAATIVFQAYGNEVDTVLIDGNVVMENRRLSFLPPERELAFLEEAQSRATAILQRANMVANPAWRSL

SEQ ID NO: 403 - protein, 473 aa, Artificial Sequence
  Description of Artificial Sequence: Synthetic peptide
MQTLSIQHGTLVTMDQYRRVLGDSWVHVQDGRIVALGVHAESVPPPADRVIDARGKVVLPGFINAHTHVNQILLRGGPSHGRQLYDWLFNVLYPGQKAMRPEVAVAVRLYCAEAVRSGITTINEDADSAIYPGNIEAAMAVYGEVGVRVVYARMFFDRMDGRIQGYVDALKARSPQVELCSIMEETAVAKDRITALSDQYHGTAGGRISVWPAPATTTTVTVEGMRWAQAFARDRAVMWTLHMAESDHDERIIGGSPAEYMECYGLLDERLQVAHCVYFDRKDVRLLHRHNVKVASQVVSNAYLGSGVAPVPEMVERGMAVGIGTDNNNSCDSVNMIGDMKFMAHIHRAVHRDADVLTPEKILEMATIDGARSLGMDHEIGSIETGKRADLILLDLRHPQTTPHHHLAATIVFQAYGNEVDTVLIDGNVVMENRRLSFLPPERELAFLEEAQSRATAILQRANMVANPAWRSL

SEQ ID NO: 404 - protein, 473 aa, Artificial Sequence
  Description of Artificial Sequence: Synthetic peptide
MQTLSIQHGTLVTMDQYRRVLGDSWVHVQDGRIVALGVHAESVPPPADRVIDARGKVVLPGFINAHTHVNQILLRGGPSHGRQLYDWLFNVLYPGQKAMRPEVAVAVRLYCAEAVRSGITTINEDADSAIYPGNIEAAMAVYGEVGVRVVYARMFFDRMDGRIQGYVDALKARSPQVELCSIMEETAVAKDRITALSDQYHGTAGGRISVWPAPATTTTVTVEGMRWAQAFARDRAVMWTLHMAESDHDERIIGGSPAEYMECYGLLDERLQVAHCVYFDRKDVRLLHRHNVKVASQVVSNAYLGSGVAPVPEMVERGMAVGIGTDNNNSSDSVNMIGDMKFMAHIHRAVHRDADVLTPEKILEMATIDGARSLGMDHEIGSIETGKRADLILLDLRHPQTTPHHHLAATIVFQAYGNEVDTVLIDGNVVMENRRLSFLPPERELAFLEEAQSRATAILQRANMVANPAWRSL

SEQ ID NO: 405 - protein, 473 aa, Artificial Sequence
  Description of Artificial Sequence: Synthetic peptide
MQTLSIQHGTLVTMDQYRRVLGDSWVHVQDGRIVALGVHAESVPPPADRVIDARGKVVLPGFINAHTHVNQILLRGGPSHGRQLYDWLFNVLYPGQKAMRPEVAVAVRLYCAEAVRSGITTINEDADSAIYPGNIEAAMAVYGEVGVRVVYARMFFDRMDGRIQGYVDALKARSPQVELCSIMEETAVAKDRITALSDQYHGTAGGRISVWPAPATTTTVTVEGMRWAQAFARDRAVMWTLHMAESDHDERIIGWSPAEYMECYGLLDERLQVAHCVYFDRKDVRLLHRHNVKVASQVVSNAYLGSGVAPVPEMVERGMAVGIGTDNDNSCDSVNMIGDMKFMAHIHRAVHRDADVLTPEKILEMATIDGARSLGMDHEIGSIETGKRADLILLDLRHPQTTPHHHLAATIVFQAYGNEVDTVLIDGNVVMENRRLSFLPPERELAFLEEAQSRATAILQRANMVANPAWRSL

SEQ ID NO: 406 - protein, 473 aa, Artificial Sequence
  Description of Artificial Sequence: Synthetic peptide
MQTLSIQHGTLVTMDQYRRVLGDSWVHVQDGRIVALGVHAESVPPPADRVIDARGKVVLPGFINAHTHVNQILLRGGPSHGRQLYDWLFNVLYPGQKAMRPEVAVAVRLYCAEAVRSGITTINEDADSAIYPGNIEAAMAVYGEVGVRVVYARMFFDRMDGRIQGYVDALKARSPQVELCSIMEETAVAKDRITALSDQYHGTAGGRISVWPAPATTTTVTVEGMRWAQAFARDRAVMWTLHMAESDHDERIIGWSPAEYMECYGLLDERLQVAHCVYFDRKDVRLLHRHNVKVASQVVSNAYLGSGVAPVPEMVERGMAVGIGTDNDNSSDSVNMIGDMKFMAHIHRAVHRDADVLTPEKILEMATIDGARSLGMDHEIGSIETGKRADLILLDLRHPQTTPHHHLAATIVFQAYGNEVDTVLIDGNVVMENRRLSFLPPERELAFLEEAQSRATAILQRANMVANPAWRSL

SEQ ID NO: 407 - protein, 473 aa, Artificial Sequence
  Description of Artificial Sequence: Synthetic peptide
MQTLSIQHGTLVTMDQYRRVLGDSWVHVQDGRIVALGVHAESVPPPADRVIDARGKVVLPGFINAHTHVNQILLRGGPSHGRQLYDWLFNVLYPGQKAMRPEVAVAVRLYCAEAVRSGITTINEDADSAIYPGNIEAAMAVYGEVGVRVVYARMFFDRMDGRIQGYVDALKARSPQVELCSIMEETAVAKDRITALSDQYHGTAGGRISVWPAPATTTTVTVEGMRWAQAFARDRAVMWTLHMAESDHDERIIGWSPAEYMECYGLLDERLQVAHCVYFDRKDVRLLHRHNVKVASQVVSNAYLGSGVAPVPEMVERGMAVGIGTDNNNSCDSVNMIGDMKFMAHIHRAVHRDADVLTPEKILEMATIDGARSLGMDHEIGSIETGKRADLILLDLRHPQTTPHHHLAATIVFQAYGNEVDTVLIDGNVVMENRRLSFLPPERELAFLEEAQSRATAILQRANMVANPAWRSL

SEQ ID NO: 408 - protein, 473 aa, Artificial Sequence
  Description of Artificial Sequence: Synthetic peptide
MQTLSIQHGTLVTMDQYRRVLGDSWVHVQDGRIVALGVHAESVPPPADRVIDARGKVVLPGFINAHTHVNQILLRGGPSHGRQLYDWLFNVLYPGQKAMRPEVAVAVRLYCAEAVRSGITTINEDADSAIYPGNIEAAMAVYGEVGVRVVYARMFFDRMDGRIQGYVDALKARSPQVELCSIMEETAVAKDRITALSDQYHGTAGGRISVWPAPATTTTVTVEGMRWAQAFARDRAVMWTLHMAESDHDERIIGWSPAEYMECYGLLDERLQVAHCVYFDRKDVRLLHRHNVKVASQVVSNAYLGSGVAPVPEMVERGMAVGIGTDNNNSSDSVNMIGDMKFMAHIHRAVHRDADVLTPEKILEMATIDGARSLGMDHEIGSIETGKRADLILLDLRHPQTTPHHHLAATIVFQAYGNEVDTVLIDGNVVMENRRLSFLPPERELAFLEEAQSRATAILQRANMVANPAWRSL

SEQ ID NO: 409 - protein, 473 aa, Artificial Sequence
  Description of Artificial Sequence: Synthetic peptide
MQTLSIQHGTLVTMDQYRRVLGDSWVHVQDGRIVALGVHAESVPPPADRVIDARGKVVLPGFINAHTHVNQILLRGGPSHGRQLYDWLFNVLYPGQKAMRPEVAVAVRLYCAEAVRSGITTINEDADSAIYPGNIEAAMAVYGEVGVRVVYARMFFDRMDGRIQGYVDALKARSPQVELCSIMEETAVAKDRITALSDQYHGTAGGRISVWPAPATTTTVTVEGMRWAQAFARDRAVMWTLHMAESDHDERILGGSPAEYMECYGLLDERLQVAHCVYFDRKDVRLLHRHNVKVASQVVSNAYLGSGVAPVPEMVERGMAVGIGTDNDNSCDSVNMIGDMKFMAHIHRAVHRDADVLTPEKILEMATIDGARSLGMDHEIGSIETGKRADLILLDLRHPQTTPHHHLAATIVFQAYGNEVDTVLIDGNVVMENRRLSFLPPERELAFLEEAQSRATAILQRANMVANPAWRSL

SEQ ID NO: 410 - protein, 473 aa, Artificial Sequence
  Description of Artificial Sequence: Synthetic peptide
MQTLSIQHGTLVTMDQYRRVLGDSWVHVQDGRIVALGVHAESVPPPADRVIDARGKVVLPGFINAHTHVNQILLRGGPSHGRQLYDWLFNVLYPGQKAMRPEVAVAVRLYCAEAVRSGITTINEDADSAIYPGNIEAAMAVYGEVGVRVVYARMFFDRMDGRIQGYVDALKARSPQVELCSIMEETAVAKDRITALSDQYHGTAGGRISVWPAPATTTTVTVEGMRWAQAFARDRAVMWTLHMAESDHDERILGGSPAEYMECYGLLDERLQVAHCVYFDRKDVRLLHRHNVKVASQVVSNAYLGSGVAPVPEMVERGMAVGIGTDNDNSSDSVNMIGDMKFMAHIHRAVHRDADVLTPEKILEMATIDGARSLGMDHEIGSIETGKRADLILLDLRHPQTTPHHHLAATIVFQAYGNEVDTVLIDGNVVMENRRLSFLPPERELAFLEEAQSRATAILQRANMVANPAWRSL

SEQ ID NO: 411 - protein, 473 aa, Artificial Sequence
  Description of Artificial Sequence: Synthetic peptide
MQTLSIQHGTLVTMDQYRRVLGDSWVHVQDGRIVALGVHAESVPPPADRVIDARGKVVLPGFINAHTHVNQILLRGGPSHGRQLYDWLFNVLYPGQKAMRPEVAVAVRLYCAEAVRSGITTINEDADSAIYPGNIEAAMAVYGEVGVRVVYARMFFDRMDGRIQGYVDALKARSPQVELCSIMEETAVAKDRITALSDQYHGTAGGRISVWPAPATTTTVTVEGMRWAQAFARDRAVMWTLHMAESDHDERILGGSPAEYMECYGLLDERLQVAHCVYFDRKDVRLLHRHNVKVASQVVSNAYLGSGVAPVPEMVERGMAVGIGTDNNNSCDSVNMIGDMKFMAHIHRAVHRDADVLTPEKILEMATIDGARSLGMDHEIGSIETGKRADLILLDLRHPQTTPHHHLAATIVFQAYGNEVDTVLIDGNVVMENRRLSFLPPERELAFLEEAQSRATAILQRANMVANPAWRSL

SEQ ID NO: 412 - protein, 473 aa, Artificial Sequence
  Description of Artificial Sequence: Synthetic peptide
MQTLSIQHGTLVTMDQYRRVLGDSWVHVQDGRIVALGVHAESVPPPADRVIDARGKVVLPGFINAHTHVNQILLRGGPSHGRQLYDWLFNVLYPGQKAMRPEVAVAVRLYCAEAVRSGITTINEDADSAIYPGNIEAAMAVYGEVGVRVVYARMFFDRMDGRIQGYVDALKARSPQVELCSIMEETAVAKDRITALSDQYHGTAGGRISVWPAPATTTTVTVEGMRWAQAFARDRAVMWTLHMAESDHDERILGGSPAEYMECYGLLDERLQVAHCVYFDRKDVRLLHRHNVKVASQVVSNAYLGSGVAPVPEMVERGMAVGIGTDNNNSSDSVNMIGDMKFMAHIHRAVHRDADVLTPEKILEMATIDGARSLGMDHEIGSIETGKRADLILLDLRHPQTTPHHHLAATIVFQAYGNEVDTVLIDGNVVMENRRLSFLPPERELAFLEEAQSRATAILQRANMVANPAWRSL

SEQ ID NO: 413 - protein, 473 aa, Artificial Sequence
  Description of Artificial Sequence: Synthetic peptide
MQTLSIQHGTLVTMDQYRRVLGDSWVHVQDGRIVALGVHAESVPPPADRVIDARGKVVLPGFINAHTHVNQILLRGGPSHGRQLYDWLFNVLYPGQKAMRPEVAVAVRLYCAEAVRSGITTINEDADSAIYPGNIEAAMAVYGEVGVRVVYARMFFDRMDGRIQGYVDALKARSPQVELCSIMEETAVAKDRITALSDQYHGTAGGRISVWPAPATTTTVTVEGMRWAQAFARDRAVMWTLHMAESDHDERILGWSPAEYMECYGLLDERLQVAHCVYFDRKDVRLLHRHNVKVASQVVSNAYLGSGVAPVPEMVERGMAVGIGTDNDNSCDSVNMIGDMKFMAHIHRAVHRDADVLTPEKILEMATIDGARSLGMDHEIGSIETGKRADLILLDLRHPQTTPHHHLAATIVFQAYGNEVDTVLIDGNVVMENRRLSFLPPERELAFLEEAQSRATAILQRANMVANPAWRSL

SEQ ID NO: 414 - protein, 473 aa, Artificial Sequence
  Description of Artificial Sequence: Synthetic peptide
MQTLSIQHGTLVTMDQYRRVLGDSWVHVQDGRIVALGVHAESVPPPADRVIDARGKVVLPGFINAHTHVNQILLRGGPSHGRQLYDWLFNVLYPGQKAMRPEVAVAVRLYCAEAVRSGITTINEDADSAIYPGNIEAAMAVYGEVGVRVVYARMFFDRMDGRIQGYVDALKARSPQVELCSIMEETAVAKDRITALSDQYHGTAGGRISVWPAPATTTTVTVEGMRWAQAFARDRAVMWTLHMAESDHDERILGWSPAEYMECYGLLDERLQVAHCVYFDRKDVRLLHRHNVKVASQVVSNAYLGSGVAPVPEMVERGMAVGIGTDNDNSSDSVNMIGDMKFMAHIHRAVHRDADVLTPEKILEMATIDGARSLGMDHEIGSIETGKRADLILLDLRHPQTTPHHHLAATIVFQAYGNEVDTVLIDGNVVMENRRLSFLPPERELAFLEEAQSRATAILQRANMVANPAWRSL

SEQ ID NO: 415 - protein, 473 aa, Artificial Sequence
  Description of Artificial Sequence: Synthetic peptide
MQTLSIQHGTLVTMDQYRRVLGDSWVHVQDGRIVALGVHAESVPPPADRVIDARGKVVLPGFINAHTHVNQILLRGGPSHGRQLYDWLFNVLYPGQKAMRPEVAVAVRLYCAEAVRSGITTINEDADSAIYPGNIEAAMAVYGEVGVRVVYARMFFDRMDGRIQGYVDALKARSPQVELCSIMEETAVAKDRITALSDQYHGTAGGRISVWPAPATTTTVTVEGMRWAQAFARDRAVMWTLHMAESDHDERILGWSPAEYMECYGLLDERLQVAHCVYFDRKDVRLLHRHNVKVASQVVSNAYLGSGVAPVPEMVERGMAVGIGTDNNNSCDSVNMIGDMKFMAHIHRAVHRDADVLTPEKILEMATIDGARSLGMDHEIGSIETGKRADLILLDLRHPQTTPHHHLAATIVFQAYGNEVDTVLIDGNVVMENRRLSFLPPERELAFLEEAQSRATAILQRANMVANPAWRSL

SEQ ID NO: 416 - protein, 473 aa, Artificial Sequence
  Description of Artificial Sequence: Synthetic peptide
MQTLSIQHGTLVTMDQYRRVLGDSWVHVQDGRIVALGVHAESVPPPADRVIDARGKVVLPGFINAHTHVNQILLRGGPSHGRQLYDWLFNVLYPGQKAMRPEVAVAVRLYCAEAVRSGITTINEDADSAIYPGNIEAAMAVYGEVGVRVVYARMFFDRMDGRIQGYVDALKARSPQVELCSIMEETAVAKDRITALSDQYHGTAGGRISVWPAPATTTTVTVEGMRWAQAFARDRAVMWTLHMAESDHDERILGWSPAEYMECYGLLDERLQVAHCVYFDRKDVRLLHRHNVKVASQVVSNAYLGSGVAPVPEMVERGMAVGIGTDNNNSSDSVNMIGDMKFMAHIHRAVHRDADVLTPEKILEMATIDGARSLGMDHEIGSIETGKRADLILLDLRHPQTTPHHHLAATIVFQAYGNEVDTVLIDGNVVMENRRLSFLPPERELAFLEEAQSRATAILQRANMVANPAWRSL

SEQ ID NO: 417 - protein, 473 aa, Artificial Sequence
  Description of Artificial Sequence: Synthetic peptide
MQTLSIQHGTLVTMDQYRRVLGDSWVHVQDGRIVALGVHAESVPPPADRVIDARGKVVLPGFINAHTHVNQILLRGGPSHGRQLYDWLFNVLYPGQKAMRPEVAVAVRLYCAEAVRSGITTINEEADSAIYPGNIEAAMAVYGEVGVRVVYARMFFDRMDGRIQGYVDALKARSPQVELCSIMEETAVAKDRITALSDQYHGTAGGRISVWPAPATITPVTVEGMRWAQAFARDRAVMWTLHMAESDHDERIIGGSPAEYMECYGLLDERLQVAHCVYFDRKDVRLLHRHNVKVASQVVSNAYLGSGVAPVPEMVERGMAVGIGTDNDNSCDSVNMIGDMKFMAHIHRAVHRDADVLTPEKILEMATIDGARSLGMDHEIGSIETGKRADLILLDLRHPQTTPHHHLAATIVFQAYGNEVDTVLIDGNVVMENRRLSFLPPERELAFLEEAQSRATAILQRANMVANPAWRSL

SEQ ID NO: 418 - protein, 473 aa, Artificial Sequence
  Description of Artificial Sequence: Synthetic peptide
MQTLSIQHGTLVTMDQYRRVLGDSWVHVQDGRIVALGVHAESVPPPADRVIDARGKVVLPGFINAHTHVNQILLRGGPSHGRQLYDWLFNVLYPGQKAMRPEVAVAVRLYCAEAVRSGITTINEEADSAIYPGNIEAAMAVYGEVGVRVVYARMFFDRMDGRIQGYVDALKARSPQVELCSIMEETAVAKDRITALSDQYHGTAGGRISVWPAPATITPVTVEGMRWAQAFARDRAVMWTLHMAESDHDERIIGGSPAEYMECYGLLDERLQVAHCVYFDRKDVRLLHRHNVKVASQVVSNAYLGSGVAPVPEMVERGMAVGIGTDNDNSSDSVNMIGDMKFMAHIHRAVHRDADVLTPEKILEMATIDGARSLGMDHEIGSIETGKRADLILLDLRHPQTTPHHHLAATIVFQAYGNEVDTVLIDGNVVMENRRLSFLPPERELAFLEEAQSRATAILQRANMVANPAWRSL

SEQ ID NO: 419 - protein, 473 aa, Artificial Sequence
  Description of Artificial Sequence: Synthetic peptide
MQTLSIQHGTLVTMDQYRRVLGDSWVHVQDGRIVALGVHAESVPPPADRVIDARGKVVLPGFINAHTHVNQILLRGGPSHGRQLYDWLFNVLYPGQKAMRPEVAVAVRLYCAEAVRSGITTINEEADSAIYPGNIEAAMAVYGEVGVRVVYARMFFDRMDGRIQGYVDALKARSPQVELCSIMEETAVAKDRITALSDQYHGTAGGRISVWPAPATITPVTVEGMRWAQAFARDRAVMWTLHMAESDHDERIIGGSPAEYMECYGLLDERLQVAHCVYFDRKDVRLLHRHNVKVASQVVSNAYLGSGVAPVPEMVERGMAVGIGTDNNNSCDSVNMIGDMKFMAHIHRAVHRDADVLTPEKILEMATIDGARSLGMDHEIGSIETGKRADLILLDLRHPQTTPHHHLAATIVFQAYGNEVDTVLIDGNVVMENRRLSFLPPERELAFLEEAQSRATAILQRANMVANPAWRSL

SEQ ID NO: 420 - protein, 473 aa, Artificial Sequence
  Description of Artificial Sequence: Synthetic peptide
MQTLSIQHGTLVTMDQYRRVLGDSWVHVQDGRIVALGVHAESVPPPADRVIDARGKVVLPGFINAHTHVNQILLRGGPSHGRQLYDWLFNVLYPGQKAMRPEVAVAVRLYCAEAVRSGITTINEEADSAIYPGNIEAAMAVYGEVGVRVVYARMFFDRMDGRIQGYVDALKARSPQVELCSIMEETAVAKDRITALSDQYHGTAGGRISVWPAPATITPVTVEGMRWAQAFARDRAVMWTLHMAESDHDERIIGGSPAEYMECYGLLDERLQVAHCVYFDRKDVRLLHRHNVKVASQVVSNAYLGSGVAPVPEMVERGMAVGIGTDNNNSSDSVNMIGDMKFMAHIHRAVHRDADVLTPEKILEMATIDGARSLGMDHEIGSIETGKRADLILLDLRHPQTTPHHHLAATIVFQAYGNEVDTVLIDGNVVMENRRLSFLPPERELAFLEEAQSRATAILQRANMVANPAWRSL

SEQ ID NO: 421 - protein, 473 aa, Artificial Sequence
  Description of Artificial Sequence: Synthetic peptide
MQTLSIQHGTLVTMDQYRRVLGDSWVHVQDGRIVALGVHAESVPPPADRVIDARGKVVLPGFINAHTHVNQILLRGGPSHGRQLYDWLFNVLYPGQKAMRPEVAVAVRLYCAEAVRSGITTINEEADSAIYPGNIEAAMAVYGEVGVRVVYARMFFDRMDGRIQGYVDALKARSPQVELCSIMEETAVAKDRITALSDQYHGTAGGRISVWPAPATITPVTVEGMRWAQAFARDRAVMWTLHMAESDHDERIIGWSPAEYMECYGLLDERLQVAHCVYFDRKDVRLLHRHNVKVASQVVSNAYLGSGVAPVPEMVERGMAVGIGTDNDNSCDSVNMIGDMKFMAHIHRAVHRDADVLTPEKILEMATIDGARSLGMDHEIGSIETGKRADLILLDLRHPQTTPHHHLAATIVFQAYGNEVDTVLIDGNVVMENRRLSFLPPERELAFLEEAQSRATAILQRANMVANPAWRSL

SEQ ID NO: 422 - protein, 473 aa, Artificial Sequence
  Description of Artificial Sequence: Synthetic peptide
MQTLSIQHGTLVTMDQYRRVLGDSWVHVQDGRIVALGVHAESVPPPADRVIDARGKVVLPGFINAHTHVNQILLRGGPSHGRQLYDWLFNVLYPGQKAMRPEVAVAVRLYCAEAVRSGITTINEEADSAIYPGNIEAAMAVYGEVGVRVVYARMFFDRMDGRIQGYVDALKARSPQVELCSIMEETAVAKDRITALSDQYHGTAGGRISVWPAPATITPVTVEGMRWAQAFARDRAVMWTLHMAESDHDERIIGWSPAEYMECYGLLDERLQVAHCVYFDRKDVRLLHRHNVKVASQVVSNAYLGSGVAPVPEMVERGMAVGIGTDNDNSSDSVNMIGDMKFMAHIHRAVHRDADVLTPEKILEMATIDGARSLGMDHEIGSIETGKRADLILLDLRHPQTTPHHHLAATIVFQAYGNEVDTVLIDGNVVMENRRLSFLPPERELAFLEEAQSRATAILQRANMVANPAWRSL

SEQ ID NO: 423 - protein, 473 aa, Artificial Sequence
  Description of Artificial Sequence: Synthetic peptide
MQTLSIQHGTLVTMDQYRRVLGDSWVHVQDGRIVALGVHAESVPPPADRVIDARGKVVLPGFINAHTHVNQILLRGGPSHGRQLYDWLFNVLYPGQKAMRPEVAVAVRLYCAEAVRSGITTINEEADSAIYPGNIEAAMAVYGEVGVRVVYARMFFDRMDGRIQGYVDALKARSPQVELCSIMEETAVAKDRITALSDQYHGTAGGRISVWPAPATITPVTVEGMRWAQAFARDRAVMWTLHMAESDHDERIIGWSPAEYMECYGLLDERLQVAHCVYFDRKDVRLLHRHNVKVASQVVSNAYLGSGVAPVPEMVERGMAVGIGTDNNNSCDSVNMIGDMKFMAHIHRAVHRDADVLTPEKILEMATIDGARSLGMDHEIGSIETGKRADLILLDLRHPQTTPHHHLAATIVFQAYGNEVDTVLIDGNVVMENRRLSFLPPERELAFLEEAQSRATAILQRANMVANPAWRSL

SEQ ID NO: 424 - protein, 473 aa, Artificial Sequence
  Description of Artificial Sequence: Synthetic peptide
MQTLSIQHGTLVTMDQYRRVLGDSWVHVQDGRIVALGVHAESVPPPADRVIDARGKVVLPGFINAHTHVNQILLRGGPSHGRQLYDWLFNVLYPGQKAMRPEVAVAVRLYCAEAVRSGITTINEEADSAIYPGNIEAAMAVYGEVGVRVVYARMFFDRMDGRIQGYVDALKARSPQVELCSIMEETAVAKDRITALSDQYHGTAGGRISVWPAPATITPVTVEGMRWAQAFARDRAVMWTLHMAESDHDERIIGWSPAEYMECYGLLDERLQVAHCVYFDRKDVRLLHRHNVKVASQVVSNAYLGSGVAPVPEMVERGMAVGIGTDNNNSSDSVNMIGDMKFMAHIHRAVHRDADVLTPEKILEMATIDGARSLGMDHEIGSIETGKRADLILLDLRHPQTTPHHHLAATIVFQAYGNEVDTVLIDGNVVMENRRLSFLPPERELAFLEEAQSRATAILQRANMVANPAWRSL

SEQ ID NO: 425 - protein, 473 aa, Artificial Sequence
  Description of Artificial Sequence: Synthetic peptide
MQTLSIQHGTLVTMDQYRRVLGDSWVHVQDGRIVALGVHAESVPPPADRVIDARGKVVLPGFINAHTHVNQILLRGGPSHGRQLYDWLFNVLYPGQKAMRPEVAVAVRLYCAEAVRSGITTINEEADSAIYPGNIEAAMAVYGEVGVRVVYARMFFDRMDGRIQGYVDALKARSPQVELCSIMEETAVAKDRITALSDQYHGTAGGRISVWPAPATITPVTVEGMRWAQAFARDRAVMWTLHMAESDHDERILGGSPAEYMECYGLLDERLQVAHCVYFDRKDVRLLHRHNVKVASQVVSNAYLGSGVAPVPEMVERGMAVGIGTDNDNSCDSVNMIGDMKFMAHIHRAVHRDADVLTPEKILEMATIDGARSLGMDHEIGSIETGKRADLILLDLRHPQTTPHHHLAATIVFQAYGNEVDTVLIDGNVVMENRRLSFLPPERELAFLEEAQSRATAILQRANMVANPAWRSL

SEQ ID NO: 426 - protein, 473 aa, Artificial Sequence
  Description of Artificial Sequence: Synthetic peptide
MQTLSIQHGTLVTMDQYRRVLGDSWVHVQDGRIVALGVHAESVPPPADRVIDARGKVVLPGFINAHTHVNQILLRGGPSHGRQLYDWLFNVLYPGQKAMRPEVAVAVRLYCAEAVRSGITTINEEADSAIYPGNIEAAMAVYGEVGVRVVYARMFFDRMDGRIQGYVDALKARSPQVELCSIMEETAVAKDRITALSDQYHGTAGGRISVWPAPATITPVTVEGMRWAQAFARDRAVMWTLHMAESDHDERILGGSPAEYMECYGLLDERLQVAHCVYFDRKDVRLLHRHNVKVASQVVSNAYLGSGVAPVPEMVERGMAVGIGTDNDNSSDSVNMIGDMKFMAHIHRAVHRDADVLTPEKILEMATIDGARSLGMDHEIGSIETGKRADLILLDLRHPQTTPHHHLAATIVFQAYGNEVDTVLIDGNVVMENRRLSFLPPERELAFLEEAQSRATAILQRANMVANPAWRSL

SEQ ID NO: 427 - protein, 473 aa, Artificial Sequence
  Description of Artificial Sequence: Synthetic peptide
MQTLSIQHGTLVTMDQYRRVLGDSWVHVQDGRIVALGVHAESVPPPADRVIDARGKVVLPGFINAHTHVNQILLRGGPSHGRQLYDWLFNVLYPGQKAMRPEVAVAVRLYCAEAVRSGITTINEEADSAIYPGNIEAAMAVYGEVGVRVVYARMFFDRMDGRIQGYVDALKARSPQVELCSIMEETAVAKDRITALSDQYHGTAGGRISVWPAPATITPVTVEGMRWAQAFARDRAVMWTLHMAESDHDERILGGSPAEYMECYGLLDERLQVAHCVYFDRKDVRLLHRHNVKVASQVVSNAYLGSGVAPVPEMVERGMAVGIGTDNNNSCDSVNMIGDMKFMAHIHRAVHRDADVLTPEKILEMATIDGARSLGMDHEIGSIETGKRADLILLDLRHPQTTPHHHLAATIVFQAYGNEVDTVLIDGNVVMENRRLSFLPPERELAFLEEAQSRATAILQRANMVANPAWRSL

SEQ ID NO: 428 - protein, 473 aa, Artificial Sequence
  Description of Artificial Sequence: Synthetic peptide
MQTLSIQHGTLVTMDQYRRVLGDSWVHVQDGRIVALGVHAESVPPPADRVIDARGKVVLPGFINAHTHVNQILLRGGPSHGRQLYDWLFNVLYPGQKAMRPEVAVAVRLYCAEAVRSGITTINEEADSAIYPGNIEAAMAVYGEVGVRVVYARMFFDRMDGRIQGYVDALKARSPQVELCSIMEETAVAKDRITALSDQYHGTAGGRISVWPAPATITPVTVEGMRWAQAFARDRAVMWTLHMAESDHDERILGGSPAEYMECYGLLDERLQVAHCVYFDRKDVRLLHRHNVKVASQVVSNAYLGSGVAPVPEMVERGMAVGIGTDNNNSSDSVNMIGDMKFMAHIHRAVHRDADVLTPEKILEMATIDGARSLGMDHEIGSIETGKRADLILLDLRHPQTTPHHHLAATIVFQAYGNEVDTVLIDGNVVMENRRLSFLPPERELAFLEEAQSRATAILQRANMVANPAWRSL

SEQ ID NO: 429 - protein, 473 aa, Artificial Sequence
  Description of Artificial Sequence: Synthetic peptide
MQTLSIQHGTLVTMDQYRRVLGDSWVHVQDGRIVALGVHAESVPPPADRVIDARGKVVLPGFINAHTHVNQILLRGGPSHGRQLYDWLFNVLYPGQKAMRPEVAVAVRLYCAEAVRSGITTINEEADSAIYPGNIEAAMAVYGEVGVRVVYARMFFDRMDGRIQGYVDALKARSPQVELCSIMEETAVAKDRITALSDQYHGTAGGRISVWPAPATITPVTVEGMRWAQAFARDRAVMWTLHMAESDHDERILGWSPAEYMECYGLLDERLQVAHCVYFDRKDVRLLHRHNVKVASQVVSNAYLGSGVAPVPEMVERGMAVGIGTDNDNSCDSVNMIGDMKFMAHIHRAVHRDADVLTPEKILEMATIDGARSLGMDHEIGSIETGKRADLILLDLRHPQTTPHHHLAATIVFQAYGNEVDTVLIDGNVVMENRRLSFLPPERELAFLEEAQSRATAILQRANMVANPAWRSL

SEQ ID NO: 430 - protein, 473 aa, Artificial Sequence
  Description of Artificial Sequence: Synthetic peptide
MQTLSIQHGTLVTMDQYRRVLGDSWVHVQDGRIVALGVHAESVPPPADRVIDARGKVVLPGFINAHTHVNQILLRGGPSHGRQLYDWLFNVLYPGQKAMRPEVAVAVRLYCAEAVRSGITTINEEADSAIYPGNIEAAMAVYGEVGVRVVYARMFFDRMDGRIQGYVDALKARSPQVELCSIMEETAVAKDRITALSDQYHGTAGGRISVWPAPATITPVTVEGMRWAQAFARDRAVMWTLHMAESDHDERILGWSPAEYMECYGLLDERLQVAHCVYFDRKDVRLLHRHNVKVASQVVSNAYLGSGVAPVPEMVERGMAVGIGTDNDNSSDSVNMIGDMKFMAHIHRAVHRDADVLTPEKILEMATIDGARSLGMDHEIGSIETGKRADLILLDLRHPQTTPHHHLAATIVFQAYGNEVDTVLIDGNVVMENRRLSFLPPERELAFLEEAQSRATAILQRANMVANPAWRSL

SEQ ID NO: 431 - protein, 473 aa, Artificial Sequence
  Description of Artificial Sequence: Synthetic peptide
MQTLSIQHGTLVTMDQYRRVLGDSWVHVQDGRIVALGVHAESVPPPADRVIDARGKVVLPGFINAHTHVNQILLRGGPSHGRQLYDWLFNVLYPGQKAMRPEVAVAVRLYCAEAVRSGITTINEEADSAIYPGNIEAAMAVYGEVGVRVVYARMFFDRMDGRIQGYVDALKARSPQVELCSIMEETAVAKDRITALSDQYHGTAGGRISVWPAPATITPVTVEGMRWAQAFARDRAVMWTLHMAESDHDERILGWSPAEYMECYGLLDERLQVAHCVYFDRKDVRLLHRHNVKVASQVVSNAYLGSGVAPVPEMVERGMAVGIGTDNNNSCDSVNMIGDMKFMAHIHRAVHRDADVLTPEKILEMATIDGARSLGMDHEIGSIETGKRADLILLDLRHPQTTPHHHLAATIVFQAYGNEVDTVLIDGNVVMENRRLSFLPPERELAFLEEAQSRATAILQRANMVANPAWRSL

SEQ ID NO: 432 - protein, 473 aa, Artificial Sequence
  Description of Artificial Sequence: Synthetic peptide
MQTLSIQHGTLVTMDQYRRVLGDSWVHVQDGRIVALGVHAESVPPPADRVIDARGKVVLPGFINAHTHVNQILLRGGPSHGRQLYDWLFNVLYPGQKAMRPEVAVAVRLYCAEAVRSGITTINEEADSAIYPGNIEAAMAVYGEVGVRVVYARMFFDRMDGRIQGYVDALKARSPQVELCSIMEETAVAKDRITALSDQYHGTAGGRISVWPAPATITPVTVEGMRWAQAFARDRAVMWTLHMAESDHDERILGWSPAEYMECYGLLDERLQVAHCVYFDRKDVRLLHRHNVKVASQVVSNAYLGSGVAPVPEMVERGMAVGIGTDNNNSSDSVNMIGDMKFMAHIHRAVHRDADVLTPEKILEMATIDGARSLGMDHEIGSIETGKRADLILLDLRHPQTTPHHHLAATIVFQAYGNEVDTVLIDGNVVMENRRLSFLPPERELAFLEEAQSRATAILQRANMVANPAWRSL

SEQ ID NO: 433 - protein, 473 aa, Artificial Sequence
  Description of Artificial Sequence: Synthetic peptide
MQTLSIQHGTLVTMDQYRRVLGDSWVHVQDGRIVALGVHAESVPPPADRVIDARGKVVLPGFINAHTHVNQILLRGGPSHGRQLYDWLFNVLYPGQKAMRPEVAVAVRLYCAEAVRSGITTINEEADSAIYPGNIEAAMAVYGEVGVRVVYARMFFDRMDGRIQGYVDALKARSPQVELCSIMEETAVAKDRITALSDQYHGTAGGRISVWPAPATITTVTVEGMRWAQAFARDRAVMWTLHMAESDHDERIIGGSPAEYMECYGLLDERLQVAHCVYFDRKDVRLLHRHNVKVASQVVSNAYLGSGVAPVPEMVERGMAVGIGTDNDNSCDSVNMIGDMKFMAHIHRAVHRDADVLTPEKILEMATIDGARSLGMDHEIGSIETGKRADLILLDLRHPQTTPHHHLAATIVFQAYGNEVDTVLIDGNVVMENRRLSFLPPERELAFLEEAQSRATAILQRANMVANPAWRSL

SEQ ID NO: 434 - protein, 473 aa, Artificial Sequence
  Description of Artificial Sequence: Synthetic peptide
MQTLSIQHGTLVTMDQYRRVLGDSWVHVQDGRIVALGVHAESVPPPADRVIDARGKVVLPGFINAHTHVNQILLRGGPSHGRQLYDWLFNVLYPGQKAMRPEVAVAVRLYCAEAVRSGITTINEEADSAIYPGNIEAAMAVYGEVGVRVVYARMFFDRMDGRIQGYVDALKARSPQVELCSIMEETAVAKDRITALSDQYHGTAGGRISVWPAPATITTVTVEGMRWAQAFARDRAVMWTLHMAESDHDERIIGGSPAEYMECYGLLDERLQVAHCVYFDRKDVRLLHRHNVKVASQVVSNAYLGSGVAPVPEMVERGMAVGIGTDNDNSSDSVNMIGDMKFMAHIHRAVHRDADVLTPEKILEMATIDGARSLGMDHEIGSIETGKRADLILLDLRHPQTTPHHHLAATIVFQAYGNEVDTVLIDGNVVMENRRLSFLPPERELAFLEEAQSRATAILQRANMVANPAWRSL

SEQ ID NO: 435 - protein, 473 aa, Artificial Sequence
  Description of Artificial Sequence: Synthetic peptide
MQTLSIQHGTLVTMDQYRRVLGDSWVHVQDGRIVALGVHAESVPPPADRVIDARGKVVLPGFINAHTHVNQILLRGGPSHGRQLYDWLFNVLYPGQKAMRPEVAVAVRLYCAEAVRSGITTINEEADSAIYPGNIEAAMAVYGEVGVRVVYARMFFDRMDGRIQGYVDALKARSPQVELCSIMEETAVAKDRITALSDQYHGTAGGRISVWPAPATITTVTVEGMRWAQAFARDRAVMWTLHMAESDHDERIIGGSPAEYMECYGLLDERLQVAHCVYFDRKDVRLLHRHNVKVASQVVSNAYLGSGVAPVPEMVERGMAVGIGTDNNNSCDSVNMIGDMKFMAHIHRAVHRDADVLTPEKILEMATIDGARSLGMDHEIGSIETGKRADLILLDLRHPQTTPHHHLAATIVFQAYGNEVDTVLIDGNVVMENRRLSFLPPERELAFLEEAQSRATAILQRANMVANPAWRSL

SEQ ID NO: 436 - protein, 473 aa, Artificial Sequence
  Description of Artificial Sequence: Synthetic peptide
MQTLSIQHGTLVTMDQYRRVLGDSWVHVQDGRIVALGVHAESVPPPADRVIDARGKVVLPGFINAHTHVNQILLRGGPSHGRQLYDWLFNVLYPGQKAMRPEVAVAVRLYCAEAVRSGITTINEEADSAIYPGNIEAAMAVYGEVGVRVVYARMFFDRMDGRIQGYVDALKARSPQVELCSIMEETAVAKDRITALSDQYHGTAGGRISVWPAPATITTVTVEGMRWAQAFARDRAVMWTLHMAESDHDERIIGGSPAEYMECYGLLDERLQVAHCVYFDRKDVRLLHRHNVKVASQVVSNAYLGSGVAPVPEMVERGMAVGIGTDNNNSSDSVNMIGDMKFMAHIHRAVHRDADVLTPEKILEMATIDGARSLGMDHEIGSIETGKRADLILLDLRHPQTTPHHHLAATIVFQAYGNEVDTVLIDGNVVMENRRLSFLPPERELAFLEEAQSRATAILQRANMVANPAWRSL

SEQ ID NO: 437 - protein, 473 aa, Artificial Sequence
  Description of Artificial Sequence: Synthetic peptide
MQTLSIQHGTLVTMDQYRRVLGDSWVHVQDGRIVALGVHAESVPPPADRVIDARGKVVLPGFINAHTHVNQILLRGGPSHGRQLYDWLFNVLYPGQKAMRPEVAVAVRLYCAEAVRSGITTINEEADSAIYPGNIEAAMAVYGEVGVRVVYARMFFDRMDGRIQGYVDALKARSPQVELCSIMEETAVAKDRITALSDQYHGTAGGRISVWPAPATITTVTVEGMRWAQAFARDRAVMWTLHMAESDHDERIIGWSPAEYMECYGLLDERLQVAHCVYFDRKDVRLLHRHNVKVASQVVSNAYLGSGVAPVPEMVERGMAVGIGTDNDNSCDSVNMIGDMKFMAHIHRAVHRDADVLTPEKILEMATIDGARSLGMDHEIGSIETGKRADLILLDLRHPQTTPHHHLAATIVFQAYGNEVDTVLIDGNVVMENRRLSFLPPERELAFLEEAQSRATAILQRANMVANPAWRSL

SEQ ID NO: 438 - protein, 473 aa, Artificial Sequence
  Description of Artificial Sequence: Synthetic peptide
MQTLSIQHGTLVTMDQYRRVLGDSWVHVQDGRIVALGVHAESVPPPADRVIDARGKVVLPGFINAHTHVNQILLRGGPSHGRQLYDWLFNVLYPGQKAMRPEVAVAVRLYCAEAVRSGITTINEEADSAIYPGNIEAAMAVYGEVGVRVVYARMFFDRMDGRIQGYVDALKARSPQVELCSIMEETAVAKDRITALSDQYHGTAGGRISVWPAPATITTVTVEGMRWAQAFARDRAVMWTLHMAESDHDERIIGWSPAEYMECYGLLDERLQVAHCVYFDRKDVRLLHRHNVKVASQVVSNAYLGSGVAPVPEMVERGMAVGIGTDNDNSSDSVNMIGDMKFMAHIHRAVHRDADVLTPEKILEMATIDGARSLGMDHEIGSIETGKRADLILLDLRHPQTTPHHHLAATIVFQAYGNEVDTVLIDGNVVMENRRLSFLPPERELAFLEEAQSRATAILQRANMVANPAWRSL

SEQ ID NO: 439 - protein, 473 aa, Artificial Sequence
  Description of Artificial Sequence: Synthetic peptide
MQTLSIQHGTLVTMDQYRRVLGDSWVHVQDGRIVALGVHAESVPPPADRVIDARGKVVLPGFINAHTHVNQILLRGGPSHGRQLYDWLFNVLYPGQKAMRPEVAVAVRLYCAEAVRSGITTINEEADSAIYPGNIEAAMAVYGEVGVRVVYARMFFDRMDGRIQGYVDALKARSPQVELCSIMEETAVAKDRITALSDQYHGTAGGRISVWPAPATITTVTVEGMRWAQAFARDRAVMWTLHMAESDHDERIIGWSPAEYMECYGLLDERLQVAHCVYFDRKDVRLLHRHNVKVASQVVSNAYLGSGVAPVPEMVERGMAVGIGTDNNNSCDSVNMIGDMKFMAHIHRAVHRDADVLTPEKILEMATIDGARSLGMDHEIGSIETGKRADLILLDLRHPQTTPHHHLAATIVFQAYGNEVDTVLIDGNVVMENRRLSFLPPERELAFLEEAQSRATAILQRANMVANPAWRSL

SEQ ID NO: 440 - protein, 473 aa, Artificial Sequence
  Description of Artificial Sequence: Synthetic peptide
MQTLSIQHGTLVTMDQYRRVLGDSWVHVQDGRIVALGVHAESVPPPADRVIDARGKVVLPGFINAHTHVNQILLRGGPSHGRQLYDWLFNVLYPGQKAMRPEVAVAVRLYCAEAVRSGITTINEEADSAIYPGNIEAAMAVYGEVGVRVVYARMFFDRMDGRIQGYVDALKARSPQVELCSIMEETAVAKDRITALSDQYHGTAGGRISVWPAPATITTVTVEGMRWAQAFARDRAVMWTLHMAESDHDERIIGWSPAEYMECYGLLDERLQVAHCVYFDRKDVRLLHRHNVKVASQVVSNAYLGSGVAPVPEMVERGMAVGIGTDNNNSSDSVNMIGDMKFMAHIHRAVHRDADVLTPEKILEMATIDGARSLGMDHEIGSIETGKRADLILLDLRHPQTTPHHHLAATIVFQAYGNEVDTVLIDGNVVMENRRLSFLPPERELAFLEEAQSRATAILQRANMVANPAWRSL

SEQ ID NO: 441 - protein, 473 aa, Artificial Sequence
  Description of Artificial Sequence: Synthetic peptide
MQTLSIQHGTLVTMDQYRRVLGDSWVHVQDGRIVALGVHAESVPPPADRVIDARGKVVLPGFINAHTHVNQILLRGGPSHGRQLYDWLFNVLYPGQKAMRPEVAVAVRLYCAEAVRSGITTINEEADSAIYPGNIEAAMAVYGEVGVRVVYARMFFDRMDGRIQGYVDALKARSPQVELCSIMEETAVAKDRITALSDQYHGTAGGRISVWPAPATITTVTVEGMRWAQAFARDRAVMWTLHMAESDHDERILGGSPAEYMECYGLLDERLQVAHCVYFDRKDVRLLHRHNVKVASQVVSNAYLGSGVAPVPEMVERGMAVGIGTDNDNSCDSVNMIGDMKFMAHIHRAVHRDADVLTPEKILEMATIDGARSLGMDHEIGSIETGKRADLILLDLRHPQTTPHHHLAATIVFQAYGNEVDTVLIDGNVVMENRRLSFLPPERELAFLEEAQSRATAILQRANMVANPAWRSL

SEQ ID NO: 442 - protein, 473 aa, Artificial Sequence
  Description of Artificial Sequence: Synthetic peptide
MQTLSIQHGTLVTMDQYRRVLGDSWVHVQDGRIVALGVHAESVPPPADRVIDARGKVVLPGFINAHTHVNQILLRGGPSHGRQLYDWLFNVLYPGQKAMRPEVAVAVRLYCAEAVRSGITTINEEADSAIYPGNIEAAMAVYGEVGVRVVYARMFFDRMDGRIQGYVDALKARSPQVELCSIMEETAVAKDRITALSDQYHGTAGGRISVWPAPATITTVTVEGMRWAQAFARDRAVMWTLHMAESDHDERILGGSPAEYMECYGLLDERLQVAHCVYFDRKDVRLLHRHNVKVASQVVSNAYLGSGVAPVPEMVERGMAVGIGTDNDNSSDSVNMIGDMKFMAHIHRAVHRDADVLTPEKILEMATIDGARSLGMDHEIGSIETGKRADLILLDLRHPQTTPHHHLAATIVFQAYGNEVDTVLIDGNVVMENRRLSFLPPERELAFLEEAQSRATAILQRANMVANPAWRSL

SEQ ID NO: 443 - protein, 473 aa, Artificial Sequence
  Description of Artificial Sequence: Synthetic peptide
MQTLSIQHGTLVTMDQYRRVLGDSWVHVQDGRIVALGVHAESVPPPADRVIDARGKVVLPGFINAHTHVNQILLRGGPSHGRQLYDWLFNVLYPGQKAMRPEVAVAVRLYCAEAVRSGITTINEEADSAIYPGNIEAAMAVYGEVGVRVVYARMFFDRMDGRIQGYVDALKARSPQVELCSIMEETAVAKDRITALSDQYHGTAGGRISVWPAPATITTVTVEGMRWAQAFARDRAVMWTLHMAESDHDERILGGSPAEYMECYGLLDERLQVAHCVYFDRKDVRLLHRHNVKVASQVVSNAYLGSGVAPVPEMVERGMAVGIGTDNNNSCDSVNMIGDMKFMAHIHRAVHRDADVLTPEKILEMATIDGARSLGMDHEIGSIETGKRADLILLDLRHPQTTPHHHLAATIVFQAYGNEVDTVLIDGNVVMENRRLSFLPPERELAFLEEAQSRATAILQRANMVANPAWRSL

SEQ ID NO: 444 - protein, 473 aa, Artificial Sequence
  Description of Artificial Sequence: Synthetic peptide
MQTLSIQHGTLVTMDQYRRVLGDSWVHVQDGRIVALGVHAESVPPPADRVIDARGKVVLPGFINAHTHVNQILLRGGPSHGRQLYDWLFNVLYPGQKAMRPEVAVAVRLYCAEAVRSGITTINEEADSAIYPGNIEAAMAVYGEVGVRVVYARMFFDRMDGRIQGYVDALKARSPQVELCSIMEETAVAKDRITALSDQYHGTAGGRISVWPAPATITTVTVEGMRWAQAFARDRAVMWTLHMAESDHDERILGGSPAEYMECYGLLDERLQVAHCVYFDRKDVRLLHRHNVKVASQVVSNAYLGSGVAPVPEMVERGMAVGIGTDNNNSSDSVNMIGDMKFMAHIHRAVHRDADVLTPEKILEMATIDGARSLGMDHEIGSIETGKRADLILLDLRHPQTTPHHHLAATIVFQAYGNEVDTVLIDGNVVMENRRLSFLPPERELAFLEEAQSRATAILQRANMVANPAWRSL

SEQ ID NO: 445 - protein, 473 aa, Artificial Sequence
  Description of Artificial Sequence: Synthetic peptide
MQTLSIQHGTLVTMDQYRRVLGDSWVHVQDGRIVALGVHAESVPPPADRVIDARGKVVLPGFINAHTHVNQILLRGGPSHGRQLYDWLFNVLYPGQKAMRPEVAVAVRLYCAEAVRSGITTINEEADSAIYPGNIEAAMAVYGEVGVRVVYARMFFDRMDGRIQGYVDALKARSPQVELCSIMEETAVAKDRITALSDQYHGTAGGRISVWPAPATITTVTVEGMRWAQAFARDRAVMWTLHMAESDHDERILGWSPAEYMECYGLLDERLQVAHCVYFDRKDVRLLHRHNVKVASQVVSNAYLGSGVAPVPEMVERGMAVGIGTDNDNSCDSVNMIGDMKFMAHIHRAVHRDADVLTPEKILEMATIDGARSLGMDHEIGSIETGKRADLILLDLRHPQTTPHHHLAATIVFQAYGNEVDTVLIDGNVVMENRRLSFLPPERELAFLEEAQSRATAILQRANMVANPAWRSL

SEQ ID NO: 446 - protein, 473 aa, Artificial Sequence
  Description of Artificial Sequence: Synthetic peptide
MQTLSIQHGTLVTMDQYRRVLGDSWVHVQDGRIVALGVHAESVPPPADRVIDARGKVVLPGFINAHTHVNQILLRGGPSHGRQLYDWLFNVLYPGQKAMRPEVAVAVRLYCAEAVRSGITTINEEADSAIYPGNIEAAMAVYGEVGVRVVYARMFFDRMDGRIQGYVDALKARSPQVELCSIMEETAVAKDRITALSDQYHGTAGGRISVWPAPATITTVTVEGMRWAQAFARDRAVMWTLHMAESDHDERILGWSPAEYMECYGLLDERLQVAHCVYFDRKDVRLLHRHNVKVASQVVSNAYLGSGVAPVPEMVERGMAVGIGTDNDNSSDSVNMIGDMKFMAHIHRAVHRDADVLTPEKILEMATIDGARSLGMDHEIGSIETGKRADLILLDLRHPQTTPHHHLAATIVFQAYGNEVDTVLIDGNVVMENRRLSFLPPERELAFLEEAQSRATAILQRANMVANPAWRSL

SEQ ID NO: 447 - protein, 473 aa, Artificial Sequence
  Description of Artificial Sequence: Synthetic peptide
MQTLSIQHGTLVTMDQYRRVLGDSWVHVQDGRIVALGVHAESVPPPADRVIDARGKVVLPGFINAHTHVNQILLRGGPSHGRQLYDWLFNVLYPGQKAMRPEVAVAVRLYCAEAVRSGITTINEEADSAIYPGNIEAAMAVYGEVGVRVVYARMFFDRMDGRIQGYVDALKARSPQVELCSIMEETAVAKDRITALSDQYHGTAGGRISVWPAPATITTVTVEGMRWAQAFARDRAVMWTLHMAESDHDERILGWSPAEYMECYGLLDERLQVAHCVYFDRKDVRLLHRHNVKVASQVVSNAYLGSGVAPVPEMVERGMAVGIGTDNNNSCDSVNMIGDMKFMAHIHRAVHRDADVLTPEKILEMATIDGARSLGMDHEIGSIETGKRADLILLDLRHPQTTPHHHLAATIVFQAYGNEVDTVLIDGNVVMENRRLSFLPPERELAFLEEAQSRATAILQRANMVANPAWRSL

SEQ ID NO: 448 - protein, 473 aa, Artificial Sequence
  Description of Artificial Sequence: Synthetic peptide
MQTLSIQHGTLVTMDQYRRVLGDSWVHVQDGRIVALGVHAESVPPPADRVIDARGKVVLPGFINAHTHVNQILLRGGPSHGRQLYDWLFNVLYPGQKAMRPEVAVAVRLYCAEAVRSGITTINEEADSAIYPGNIEAAMAVYGEVGVRVVYARMFFDRMDGRIQGYVDALKARSPQVELCSIMEETAVAKDRITALSDQYHGTAGGRISVWPAPATITTVTVEGMRWAQAFARDRAVMWTLHMAESDHDERILGWSPAEYMECYGLLDERLQVAHCVYFDRKDVRLLHRHNVKVASQVVSNAYLGSGVAPVPEMVERGMAVGIGTDNNNSSDSVNMIGDMKFMAHIHRAVHRDADVLTPEKILEMATIDGARSLGMDHEIGSIETGKRADLILLDLRHPQTTPHHHLAATIVFQAYGNEVDTVLIDGNVVMENRRLSFLPPERELAFLEEAQSRATAILQRANMVANPAWRSL

SEQ ID NO: 449 - protein, 473 aa, Artificial Sequence
  Description of Artificial Sequence: Synthetic peptide
MQTLSIQHGTLVTMDQYRRVLGDSWVHVQDGRIVALGVHAESVPPPADRVIDARGKVVLPGFINAHTHVNQILLRGGPSHGRQLYDWLFNVLYPGQKAMRPEVAVAVRLYCAEAVRSGITTINEEADSAIYPGNIEAAMAVYGEVGVRVVYARMFFDRMDGRIQGYVDALKARSPQVELCSIMEETAVAKDRITALSDQYHGTAGGRISVWPAPATTTPVTVEGMRWAQAFARDRAVMWTLHMAESDHDERIIGGSPAEYMECYGLLDERLQVAHCVYFDRKDVRLLHRHNVKVASQVVSNAYLGSGVAPVPEMVERGMAVGIGTDNDNSCDSVNMIGDMKFMAHIHRAVHRDADVLTPEKILEMATIDGARSLGMDHEIGSIETGKRADLILLDLRHPQTTPHHHLAATIVFQAYGNEVDTVLIDGNVVMENRRLSFLPPERELAFLEEAQSRATAILQRANMVANPAWRSL

SEQ ID NO: 450 - protein, 473 aa, Artificial Sequence
  Description of Artificial Sequence: Synthetic peptide
MQTLSIQHGTLVTMDQYRRVLGDSWVHVQDGRIVALGVHAESVPPPADRVIDARGKVVLPGFINAHTHVNQILLRGGPSHGRQLYDWLFNVLYPGQKAMRPEVAVAVRLYCAEAVRSGITTINEEADSAIYPGNIEAAMAVYGEVGVRVVYARMFFDRMDGRIQGYVDALKARSPQVELCSIMEETAVAKDRITALSDQYHGTAGGRISVWPAPATTTPVTVEGMRWAQAFARDRAVMWTLHMAESDHDERIIGGSPAEYMECYGLLDERLQVAHCVYFDRKDVRLLHRHNVKVASQVVSNAYLGSGVAPVPEMVERGMAVGIGTDNDNSSDSVNMIGDMKFMAHIHRAVHRDADVLTPEKILEMATIDGARSLGMDHEIGSIETGKRADLILLDLRHPQTTPHHHLAATIVFQAYGNEVDTVLIDGNVVMENRRLSFLPPERELAFLEEAQSRATAILQRANMVANPAWRSL

SEQ ID NO: 451 - protein, 473 aa, Artificial Sequence
  Description of Artificial Sequence: Synthetic peptide
MQTLSIQHGTLVTMDQYRRVLGDSWVHVQDGRIVALGVHAESVPPPADRVIDARGKVVLPGFINAHTHVNQILLRGGPSHGRQLYDWLFNVLYPGQKAMRPEVAVAVRLYCAEAVRSGITTINEEADSAIYPGNIEAAMAVYGEVGVRVVYARMFFDRMDGRIQGYVDALKARSPQVELCSIMEETAVAKDRITALSDQYHGTAGGRISVWPAPATTTPVTVEGMRWAQAFARDRAVMWTLHMAESDHDERIIGGSPAEYMECYGLLDERLQVAHCVYFDRKDVRLLHRHNVKVASQVVSNAYLGSGVAPVPEMVERGMAVGIGTDNNNSCDSVNMIGDMKFMAHIHRAVHRDADVLTPEKILEMATIDGARSLGMDHEIGSIETGKRADLILLDLRHPQTTPHHHLAATIVFQAYGNEVDTVLIDGNVVMENRRLSFLPPERELAFLEEAQSRATAILQRANMVANPAWRSL

SEQ ID NO: 452 - protein, 473 aa, Artificial Sequence
  Description of Artificial Sequence: Synthetic peptide
MQTLSIQHGTLVTMDQYRRVLGDSWVHVQDGRIVALGVHAESVPPPADRVIDARGKVVLPGFINAHTHVNQILLRGGPSHGRQLYDWLFNVLYPGQKAMRPEVAVAVRLYCAEAVRSGITTINEEADSAIYPGNIEAAMAVYGEVGVRVVYARMFFDRMDGRIQGYVDALKARSPQVELCSIMEETAVAKDRITALSDQYHGTAGGRISVWPAPATTTPVTVEGMRWAQAFARDRAVMWTLHMAESDHDERIIGGSPAEYMECYGLLDERLQVAHCVYFDRKDVRLLHRHNVKVASQVVSNAYLGSGVAPVPEMVERGMAVGIGTDNNNSSDSVNMIGDMKFMAHIHRAVHRDADVLTPEKILEMATIDGARSLGMDHEIGSIETGKRADLILLDLRHPQTTPHHHLAATIVFQAYGNEVDTVLIDGNVVMENRRLSFLPPERELAFLEEAQSRATAILQRANMVANPAWRSL

SEQ ID NO: 453 - protein, 473 aa, Artificial Sequence
  Description of Artificial Sequence: Synthetic peptide
MQTLSIQHGTLVTMDQYRRVLGDSWVHVQDGRIVALGVHAESVPPPADRVIDARGKVVLPGFINAHTHVNQILLRGGPSHGRQLYDWLFNVLYPGQKAMRPEVAVAVRLYCAEAVRSGITTINEEADSAIYPGNIEAAMAVYGEVGVRVVYARMFFDRMDGRIQGYVDALKARSPQVELCSIMEETAVAKDRITALSDQYHGTAGGRISVWPAPATTTPVTVEGMRWAQAFARDRAVMWTLHMAESDHDERIIGWSPAEYMECYGLLDERLQVAHCVYFDRKDVRLLHRHNVKVASQVVSNAYLGSGVAPVPEMVERGMAVGIGTDNDNSCDSVNMIGDMKFMAHIHRAVHRDADVLTPEKILEMATIDGARSLGMDHEIGSIETGKRADLILLDLRHPQTTPHHHLAATIVFQAYGNEVDTVLIDGNVVMENRRLSFLPPERELAFLEEAQSRATAILQRANMVANPAWRSL

SEQ ID NO: 454 - protein, 473 aa, Artificial Sequence
  Description of Artificial Sequence: Synthetic peptide
MQTLSIQHGTLVTMDQYRRVLGDSWVHVQDGRIVALGVHAESVPPPADRVIDARGKVVLPGFINAHTHVNQILLRGGPSHGRQLYDWLFNVLYPGQKAMRPEVAVAVRLYCAEAVRSGITTINEEADSAIYPGNIEAAMAVYGEVGVRVVYARMFFDRMDGRIQGYVDALKARSPQVELCSIMEETAVAKDRITALSDQYHGTAGGRISVWPAPATTTPVTVEGMRWAQAFARDRAVMWTLHMAESDHDERIIGWSPAEYMECYGLLDERLQVAHCVYFDRKDVRLLHRHNVKVASQVVSNAYLGSGVAPVPEMVERGMAVGIGTDNDNSSDSVNMIGDMKFMAHIHRAVHRDADVLTPEKILEMATIDGARSLGMDHEIGSIETGKRADLILLDLRHPQTTPHHHLAATIVFQAYGNEVDTVLIDGNVVMENRRLSFLPPERELAFLEEAQSRATAILQRANMVANPAWRSL

SEQ ID NO: 455 - protein, 473 aa, Artificial Sequence
  Description of Artificial Sequence: Synthetic peptide
MQTLSIQHGTLVTMDQYRRVLGDSWVHVQDGRIVALGVHAESVPPPADRVIDARGKVVLPGFINAHTHVNQILLRGGPSHGRQLYDWLFNVLYPGQKAMRPEVAVAVRLYCAEAVRSGITTINEEADSAIYPGNIEAAMAVYGEVGVRVVYARMFFDRMDGRIQGYVDALKARSPQVELCSIMEETAVAKDRITALSDQYHGTAGGRISVWPAPATTTPVTVEGMRWAQAFARDRAVMWTLHMAESDHDERIIGWSPAEYMECYGLLDERLQVAHCVYFDRKDVRLLHRHNVKVASQVVSNAYLGSGVAPVPEMVERGMAVGIGTDNNNSCDSVNMIGDMKFMAHIHRAVHRDADVLTPEKILEMATIDGARSLGMDHEIGSIETGKRADLILLDLRHPQTTPHHHLAATIVFQAYGNEVDTVLIDGNVVMENRRLSFLPPERELAFLEEAQSRATAILQRANMVANPAWRSL

SEQ ID NO: 456 - protein, 473 aa, Artificial Sequence
  Description of Artificial Sequence: Synthetic peptide
MQTLSIQHGTLVTMDQYRRVLGDSWVHVQDGRIVALGVHAESVPPPADRVIDARGKVVLPGFINAHTHVNQILLRGGPSHGRQLYDWLFNVLYPGQKAMRPEVAVAVRLYCAEAVRSGITTINEEADSAIYPGNIEAAMAVYGEVGVRVVYARMFFDRMDGRIQGYVDALKARSPQVELCSIMEETAVAKDRITALSDQYHGTAGGRISVWPAPATTTPVTVEGMRWAQAFARDRAVMWTLHMAESDHDERIIGWSPAEYMECYGLLDERLQVAHCVYFDRKDVRLLHRHNVKVASQVVSNAYLGSGVAPVPEMVERGMAVGIGTDNNNSSDSVNMIGDMKFMAHIHRAVHRDADVLTPEKILEMATIDGARSLGMDHEIGSIETGKRADLILLDLRHPQTTPHHHLAATIVFQAYGNEVDTVLIDGNVVMENRRLSFLPPERELAFLEEAQSRATAILQRANMVANPAWRSL

SEQ ID NO: 457 - protein, 473 aa, Artificial Sequence
  Description of Artificial Sequence: Synthetic peptide
MQTLSIQHGTLVTMDQYRRVLGDSWVHVQDGRIVALGVHAESVPPPADRVIDARGKVVLPGFINAHTHVNQILLRGGPSHGRQLYDWLFNVLYPGQKAMRPEVAVAVRLYCAEAVRSGITTINEEADSAIYPGNIEAAMAVYGEVGVRVVYARMFFDRMDGRIQGYVDALKARSPQVELCSIMEETAVAKDRITALSDQYHGTAGGRISVWPAPATTTPVTVEGMRWAQAFARDRAVMWTLHMAESDHDERILGGSPAEYMECYGLLDERLQVAHCVYFDRKDVRLLHRHNVKVASQVVSNAYLGSGVAPVPEMVERGMAVGIGTDNDNSCDSVNMIGDMKFMAHIHRAVHRDADVLTPEKILEMATIDGARSLGMDHEIGSIETGKRADLILLDLRHPQTTPHHHLAATIVFQAYGNEVDTVLIDGNVVMENRRLSFLPPERELAFLEEAQSRATAILQRANMVANPAWRSL

SEQ ID NO: 458 - protein, 473 aa, Artificial Sequence
  Description of Artificial Sequence: Synthetic peptide
MQTLSIQHGTLVTMDQYRRVLGDSWVHVQDGRIVALGVHAESVPPPADRVIDARGKVVLPGFINAHTHVNQILLRGGPSHGRQLYDWLFNVLYPGQKAMRPEVAVAVRLYCAEAVRSGITTINEEADSAIYPGNIEAAMAVYGEVGVRVVYARMFFDRMDGRIQGYVDALKARSPQVELCSIMEETAVAKDRITALSDQYHGTAGGRISVWPAPATTTPVTVEGMRWAQAFARDRAVMWTLHMAESDHDERILGGSPAEYMECYGLLDERLQVAHCVYFDRKDVRLLHRHNVKVASQVVSNAYLGSGVAPVPEMVERGMAVGIGTDNDNSSDSVNMIGDMKFMAHIHRAVHRDADVLTPEKILEMATIDGARSLGMDHEIGSIETGKRADLILLDLRHPQTTPHHHLAATIVFQAYGNEVDTVLIDGNVVMENRRLSFLPPERELAFLEEAQSRATAILQRANMVANPAWRSL

SEQ ID NO: 459 - protein, 473 aa, Artificial Sequence
  Description of Artificial Sequence: Synthetic peptide
MQTLSIQHGTLVTMDQYRRVLGDSWVHVQDGRIVALGVHAESVPPPADRVIDARGKVVLPGFINAHTHVNQILLRGGPSHGRQLYDWLFNVLYPGQKAMRPEVAVAVRLYCAEAVRSGITTINEEADSAIYPGNIEAAMAVYGEVGVRVVYARMFFDRMDGRIQGYVDALKARSPQVELCSIMEETAVAKDRITALSDQYHGTAGGRISVWPAPATTTPVTVEGMRWAQAFARDRAVMWTLHMAESDHDERILGGSPAEYMECYGLLDERLQVAHCVYFDRKDVRLLHRHNVKVASQVVSNAYLGSGVAPVPEMVERGMAVGIGTDNNNSCDSVNMIGDMKFMAHIHRAVHRDADVLTPEKILEMATIDGARSLGMDHEIGSIETGKRADLILLDLRHPQTTPHHHLAATIVFQAYGNEVDTVLIDGNVVMENRRLSFLPPERELAFLEEAQSRATAILQRANMVANPAWRSL

SEQ ID NO: 460 - protein, 473 aa, Artificial Sequence
  Description of Artificial Sequence: Synthetic peptide
MQTLSIQHGTLVTMDQYRRVLGDSWVHVQDGRIVALGVHAESVPPPADRVIDARGKVVLPGFINAHTHVNQILLRGGPSHGRQLYDWLFNVLYPGQKAMRPEVAVAVRLYCAEAVRSGITTINEEADSAIYPGNIEAAMAVYGEVGVRVVYARMFFDRMDGRIQGYVDALKARSPQVELCSIMEETAVAKDRITALSDQYHGTAGGRISVWPAPATTTPVTVEGMRWAQAFARDRAVMWTLHMAESDHDERILGGSPAEYMECYGLLDERLQVAHCVYFDRKDVRLLHRHNVKVASQVVSNAYLGSGVAPVPEMVERGMAVGIGTDNNNSSDSVNMIGDMKFMAHIHRAVHRDADVLTPEKILEMATIDGARSLGMDHEIGSIETGKRADLILLDLRHPQTTPHHHLAATIVFQAYGNEVDTVLIDGNVVMENRRLSFLPPERELAFLEEAQSRATAILQRANMVANPAWRSL

SEQ ID NO: 461 - protein, 473 aa, Artificial Sequence
  Description of Artificial Sequence: Synthetic peptide
MQTLSIQHGTLVTMDQYRRVLGDSWVHVQDGRIVALGVHAESVPPPADRVIDARGKVVLPGFINAHTHVNQILLRGGPSHGRQLYDWLFNVLYPGQKAMRPEVAVAVRLYCAEAVRSGITTINEEADSAIYPGNIEAAMAVYGEVGVRVVYARMFFDRMDGRIQGYVDALKARSPQVELCSIMEETAVAKDRITALSDQYHGTAGGRISVWPAPATTTPVTVEGMRWAQAFARDRAVMWTLHMAESDHDERILGWSPAEYMECYGLLDERLQVAHCVYFDRKDVRLLHRHNVKVASQVVSNAYLGSGVAPVPEMVERGMAVGIGTDNDNSCDSVNMIGDMKFMAHIHRAVHRDADVLTPEKILEMATIDGARSLGMDHEIGSIETGKRADLILLDLRHPQTTPHHHLAATIVFQAYGNEVDTVLIDGNVVMENRRLSFLPPERELAFLEEAQSRATAILQRANMVANPAWRSL

SEQ ID NO: 462 - protein, 473 aa, Artificial Sequence
  Description of Artificial Sequence: Synthetic peptide
MQTLSIQHGTLVTMDQYRRVLGDSWVHVQDGRIVALGVHAESVPPPADRVIDARGKVVLPGFINAHTHVNQILLRGGPSHGRQLYDWLFNVLYPGQKAMRPEVAVAVRLYCAEAVRSGITTINEEADSAIYPGNIEAAMAVYGEVGVRVVYARMFFDRMDGRIQGYVDALKARSPQVELCSIMEETAVAKDRITALSDQYHGTAGGRISVWPAPATTTPVTVEGMRWAQAFARDRAVMWTLHMAESDHDERILGWSPAEYMECYGLLDERLQVAHCVYFDRKDVRLLHRHNVKVASQVVSNAYLGSGVAPVPEMVERGMAVGIGTDNDNSSDSVNMIGDMKFMAHIHRAVHRDADVLTPEKILEMATIDGARSLGMDHEIGSIETGKRADLILLDLRHPQTTPHHHLAATIVFQAYGNEVDTVLIDGNVVMENRRLSFLPPERELAFLEEAQSRATAILQRANMVANPAWRSL

SEQ ID NO: 463 - protein, 473 aa, Artificial Sequence
  Description of Artificial Sequence: Synthetic peptide
MQTLSIQHGTLVTMDQYRRVLGDSWVHVQDGRIVALGVHAESVPPPADRVIDARGKVVLPGFINAHTHVNQILLRGGPSHGRQLYDWLFNVLYPGQKAMRPEVAVAVRLYCAEAVRSGITTINEEADSAIYPGNIEAAMAVYGEVGVRVVYARMFFDRMDGRIQGYVDALKARSPQVELCSIMEETAVAKDRITALSDQYHGTAGGRISVWPAPATTTPVTVEGMRWAQAFARDRAVMWTLHMAESDHDERILGWSPAEYMECYGLLDERLQVAHCVYFDRKDVRLLHRHNVKVASQVVSNAYLGSGVAPVPEMVERGMAVGIGTDNNNSCDSVNMIGDMKFMAHIHRAVHRDADVLTPEKILEMATIDGARSLGMDHEIGSIETGKRADLILLDLRHPQTTPHHHLAATIVFQAYGNEVDTVLIDGNVVMENRRLSFLPPERELAFLEEAQSRATAILQRANMVANPAWRSL

SEQ ID NO: 464 - protein, 473 aa, Artificial Sequence
  Description of Artificial Sequence: Synthetic peptide
MQTLSIQHGTLVTMDQYRRVLGDSWVHVQDGRIVALGVHAESVPPPADRVIDARGKVVLPGFINAHTHVNQILLRGGPSHGRQLYDWLFNVLYPGQKAMRPEVAVAVRLYCAEAVRSGITTINEEADSAIYPGNIEAAMAVYGEVGVRVVYARMFFDRMDGRIQGYVDALKARSPQVELCSIMEETAVAKDRITALSDQYHGTAGGRISVWPAPATTTPVTVEGMRWAQAFARDRAVMWTLHMAESDHDERILGWSPAEYMECYGLLDERLQVAHCVYFDRKDVRLLHRHNVKVASQVVSNAYLGSGVAPVPEMVERGMAVGIGTDNNNSSDSVNMIGDMKFMAHIHRAVHRDADVLTPEKILEMATIDGARSLGMDHEIGSIETGKRADLILLDLRHPQTTPHHHLAATIVFQAYGNEVDTVLIDGNVVMENRRLSFLPPERELAFLEEAQSRATAILQRANMVANPAWRSL

SEQ ID NO: 465 - protein, 473 aa, Artificial Sequence
  Description of Artificial Sequence: Synthetic peptide
MQTLSIQHGTLVTMDQYRRVLGDSWVHVQDGRIVALGVHAESVPPPADRVIDARGKVVLPGFINAHTHVNQILLRGGPSHGRQLYDWLFNVLYPGQKAMRPEVAVAVRLYCAEAVRSGITTINEEADSAIYPGNIEAAMAVYGEVGVRVVYARMFFDRMDGRIQGYVDALKARSPQVELCSIMEETAVAKDRITALSDQYHGTAGGRISVWPAPATTTTVTVEGMRWAQAFARDRAVMWTLHMAESDHDERIIGGSPAEYMECYGLLDERLQVAHCVYFDRKDVRLLHRHNVKVASQVVSNAYLGSGVAPVPEMVERGMAVGIGTDNDNSCDSVNMIGDMKFMAHIHRAVHRDADVLTPEKILEMATIDGARSLGMDHEIGSIETGKRADLILLDLRHPQTTPHHHLAATIVFQAYGNEVDTVLIDGNVVMENRRLSFLPPERELAFLEEAQSRATAILQRANMVANPAWRSL

SEQ ID NO: 466 - protein, 473 aa, Artificial Sequence
  Description of Artificial Sequence: Synthetic peptide
MQTLSIQHGTLVTMDQYRRVLGDSWVHVQDGRIVALGVHAESVPPPADRVIDARGKVVLPGFINAHTHVNQILLRGGPSHGRQLYDWLFNVLYPGQKAMRPEVAVAVRLYCAEAVRSGITTINEEADSAIYPGNIEAAMAVYGEVGVRVVYARMFFDRMDGRIQGYVDALKARSPQVELCSIMEETAVAKDRITALSDQYHGTAGGRISVWPAPATTTTVTVEGMRWAQAFARDRAVMWTLHMAESDHDERIIGGSPAEYMECYGLLDERLQVAHCVYFDRKDVRLLHRHNVKVASQVVSNAYLGSGVAPVPEMVERGMAVGIGTDNDNSSDSVNMIGDMKFMAHIHRAVHRDADVLTPEKILEMATIDGARSLGMDHEIGSIETGKRADLILLDLRHPQTTPHHHLAATIVFQAYGNEVDTVLIDGNVVMENRRLSFLPPERELAFLEEAQSRATAILQRANMVANPAWRSL

SEQ ID NO: 467 - protein, 473 aa, Artificial Sequence
  Description of Artificial Sequence: Synthetic peptide
MQTLSIQHGTLVTMDQYRRVLGDSWVHVQDGRIVALGVHAESVPPPADRVIDARGKVVLPGFINAHTHVNQILLRGGPSHGRQLYDWLFNVLYPGQKAMRPEVAVAVRLYCAEAVRSGITTINEEADSAIYPGNIEAAMAVYGEVGVRVVYARMFFDRMDGRIQGYVDALKARSPQVELCSIMEETAVAKDRITALSDQYHGTAGGRISVWPAPATTTTVTVEGMRWAQAFARDRAVMWTLHMAESDHDERIIGGSPAEYMECYGLLDERLQVAHCVYFDRKDVRLLHRHNVKVASQVVSNAYLGSGVAPVPEMVERGMAVGIGTDNNNSCDSVNMIGDMKFMAHIHRAVHRDADVLTPEKILEMATIDGARSLGMDHEIGSIETGKRADLILLDLRHPQTTPHHHLAATIVFQAYGNEVDTVLIDGNVVMENRRLSFLPPERELAFLEEAQSRATAILQRANMVANPAWRSL

SEQ ID NO: 468 - protein, 473 aa, Artificial Sequence
  Description of Artificial Sequence: Synthetic peptide
MQTLSIQHGTLVTMDQYRRVLGDSWVHVQDGRIVALGVHAESVPPPADRVIDARGKVVLPGFINAHTHVNQILLRGGPSHGRQLYDWLFNVLYPGQKAMRPEVAVAVRLYCAEAVRSGITTINEEADSAIYPGNIEAAMAVYGEVGVRVVYARMFFDRMDGRIQGYVDALKARSPQVELCSIMEETAVAKDRITALSDQYHGTAGGRISVWPAPATTTTVTVEGMRWAQAFARDRAVMWTLHMAESDHDERIIGGSPAEYMECYGLLDERLQVAHCVYFDRKDVRLLHRHNVKVASQVVSNAYLGSGVAPVPEMVERGMAVGIGTDNNNSSDSVNMIGDMKFMAHIHRAVHRDADVLTPEKILEMATIDGARSLGMDHEIGSIETGKRADLILLDLRHPQTTPHHHLAATIVFQAYGNEVDTVLIDGNVVMENRRLSFLPPERELAFLEEAQSRATAILQRANMVANPAWRSL

SEQ ID NO: 469 - protein, 473 aa, Artificial Sequence
  Description of Artificial Sequence: Synthetic peptide
MQTLSIQHGTLVTMDQYRRVLGDSWVHVQDGRIVALGVHAESVPPPADRVIDARGKVVLPGFINAHTHVNQILLRGGPSHGRQLYDWLFNVLYPGQKAMRPEVAVAVRLYCAEAVRSGITTINEEADSAIYPGNIEAAMAVYGEVGVRVVYARMFFDRMDGRIQGYVDALKARSPQVELCSIMEETAVAKDRITALSDQYHGTAGGRISVWPAPATTTTVTVEGMRWAQAFARDRAVMWTLHMAESDHDERIIGWSPAEYMECYGLLDERLQVAHCVYFDRKDVRLLHRHNVKVASQVVSNAYLGSGVAPVPEMVERGMAVGIGTDNDNSCDSVNMIGDMKFMAHIHRAVHRDADVLTPEKILEMATIDGARSLGMDHEIGSIETGKRADLILLDLRHPQTTPHHHLAATIVFQAYGNEVDTVLIDGNVVMENRRLSFLPPERELAFLEEAQSRATAILQRANMVANPAWRSL

SEQ ID NO: 470 - protein, 473 aa, Artificial Sequence
  Description of Artificial Sequence: Synthetic peptide
MQTLSIQHGTLVTMDQYRRVLGDSWVHVQDGRIVALGVHAESVPPPADRVIDARGKVVLPGFINAHTHVNQILLRGGPSHGRQLYDWLFNVLYPGQKAMRPEVAVAVRLYCAEAVRSGITTINEEADSAIYPGNIEAAMAVYGEVGVRVVYARMFFDRMDGRIQGYVDALKARSPQVELCSIMEETAVAKDRITALSDQYHGTAGGRISVWPAPATTTTVTVEGMRWAQAFARDRAVMWTLHMAESDHDERIIGWSPAEYMECYGLLDERLQVAHCVYFDRKDVRLLHRHNVKVASQVVSNAYLGSGVAPVPEMVERGMAVGIGTDNDNSSDSVNMIGDMKFMAHIHRAVHRDADVLTPEKILEMATIDGARSLGMDHEIGSIETGKRADLILLDLRHPQTTPHHHLAATIVFQAYGNEVDTVLIDGNVVMENRRLSFLPPERELAFLEEAQSRATAILQRANMVANPAWRSL

SEQ ID NO: 471 - protein, 473 aa, Artificial Sequence
  Description of Artificial Sequence: Synthetic peptide
MQTLSIQHGTLVTMDQYRRVLGDSWVHVQDGRIVALGVHAESVPPPADRVIDARGKVVLPGFINAHTHVNQILLRGGPSHGRQLYDWLFNVLYPGQKAMRPEVAVAVRLYCAEAVRSGITTINEEADSAIYPGNIEAAMAVYGEVGVRVVYARMFFDRMDGRIQGYVDALKARSPQVELCSIMEETAVAKDRITALSDQYHGTAGGRISVWPAPATTTTVTVEGMRWAQAFARDRAVMWTLHMAESDHDERIIGWSPAEYMECYGLLDERLQVAHCVYFDRKDVRLLHRHNVKVASQVVSNAYLGSGVAPVPEMVERGMAVGIGTDNNNSCDSVNMIGDMKFMAHIHRAVHRDADVLTPEKILEMATIDGARSLGMDHEIGSIETGKRADLILLDLRHPQTTPHHHLAATIVFQAYGNEVDTVLIDGNVVMENRRLSFLPPERELAFLEEAQSRATAILQRANMVANPAWRSL

SEQ ID NO: 472 - protein, 473 aa, Artificial Sequence
  Description of Artificial Sequence: Synthetic peptide
MQTLSIQHGTLVTMDQYRRVLGDSWVHVQDGRIVALGVHAESVPPPADRVIDARGKVVLPGFINAHTHVNQILLRGGPSHGRQLYDWLFNVLYPGQKAMRPEVAVAVRLYCAEAVRSGITTINEEADSAIYPGNIEAAMAVYGEVGVRVVYARMFFDRMDGRIQGYVDALKARSPQVELCSIMEETAVAKDRITALSDQYHGTAGGRISVWPAPATTTTVTVEGMRWAQAFARDRAVMWTLHMAESDHDERIIGWSPAEYMECYGLLDERLQVAHCVYFDRKDVRLLHRHNVKVASQVVSNAYLGSGVAPVPEMVERGMAVGIGTDNNNSSDSVNMIGDMKFMAHIHRAVHRDADVLTPEKILEMATIDGARSLGMDHEIGSIETGKRADLILLDLRHPQTTPHHHLAATIVFQAYGNEVDTVLIDGNVVMENRRLSFLPPERELAFLEEAQSRATAILQRANMVANPAWRSL

SEQ ID NO: 473 - protein, 473 aa, Artificial Sequence
  Description of Artificial Sequence: Synthetic peptide
MQTLSIQHGTLVTMDQYRRVLGDSWVHVQDGRIVALGVHAESVPPPADRVIDARGKVVLPGFINAHTHVNQILLRGGPSHGRQLYDWLFNVLYPGQKAMRPEVAVAVRLYCAEAVRSGITTINEEADSAIYPGNIEAAMAVYGEVGVRVVYARMFFDRMDGRIQGYVDALKARSPQVELCSIMEETAVAKDRITALSDQYHGTAGGRISVWPAPATTTTVTVEGMRWAQAFARDRAVMWTLHMAESDHDERILGGSPAEYMECYGLLDERLQVAHCVYFDRKDVRLLHRHNVKVASQVVSNAYLGSGVAPVPEMVERGMAVGIGTDNDNSCDSVNMIGDMKFMAHIHRAVHRDADVLTPEKILEMATIDGARSLGMDHEIGSIETGKRADLILLDLRHPQTTPHHHLAATIVFQAYGNEVDTVLIDGNVVMENRRLSFLPPERELAFLEEAQSRATAILQRANMVANPAWRSL

SEQ ID NO: 474 - protein, 473 aa, Artificial Sequence
  Description of Artificial Sequence: Synthetic peptide
MQTLSIQHGTLVTMDQYRRVLGDSWVHVQDGRIVALGVHAESVPPPADRVIDARGKVVLPGFINAHTHVNQILLRGGPSHGRQLYDWLFNVLYPGQKAMRPEVAVAVRLYCAEAVRSGITTINEEADSAIYPGNIEAAMAVYGEVGVRVVYARMFFDRMDGRIQGYVDALKARSPQVELCSIMEETAVAKDRITALSDQYHGTAGGRISVWPAPATTTTVTVEGMRWAQAFARDRAVMWTLHMAESDHDERILGGSPAEYMECYGLLDERLQVAHCVYFDRKDVRLLHRHNVKVASQVVSNAYLGSGVAPVPEMVERGMAVGIGTDNDNSSDSVNMIGDMKFMAHIHRAVHRDADVLTPEKILEMATIDGARSLGMDHEIGSIETGKRADLILLDLRHPQTTPHHHLAATIVFQAYGNEVDTVLIDGNVVMENRRLSFLPPERELAFLEEAQSRATAILQRANMVANPAWRSL

SEQ ID NO: 475 - protein, 473 aa, Artificial Sequence
  Description of Artificial Sequence: Synthetic peptide
MQTLSIQHGTLVTMDQYRRVLGDSWVHVQDGRIVALGVHAESVPPPADRVIDARGKVVLPGFINAHTHVNQILLRGGPSHGRQLYDWLFNVLYPGQKAMRPEVAVAVRLYCAEAVRSGITTINEEADSAIYPGNIEAAMAVYGEVGVRVVYARMFFDRMDGRIQGYVDALKARSPQVELCSIMEETAVAKDRITALSDQYHGTAGGRISVWPAPATTTTVTVEGMRWAQAFARDRAVMWTLHMAESDHDERILGGSPAEYMECYGLLDERLQVAHCVYFDRKDVRLLHRHNVKVASQVVSNAYLGSGVAPVPEMVERGMAVGIGTDNNNSCDSVNMIGDMKFMAHIHRAVHRDADVLTPEKILEMATIDGARSLGMDHEIGSIETGKRADLILLDLRHPQTTPHHHLAATIVFQAYGNEVDTVLIDGNVVMENRRLSFLPPERELAFLEEAQSRATAILQRANMVANPAWRSL

SEQ ID NO: 476 - protein, 473 aa, Artificial Sequence
  Description of Artificial Sequence: Synthetic peptide
MQTLSIQHGTLVTMDQYRRVLGDSWVHVQDGRIVALGVHAESVPPPADRVIDARGKVVLPGFINAHTHVNQILLRGGPSHGRQLYDWLFNVLYPGQKAMRPEVAVAVRLYCAEAVRSGITTINEEADSAIYPGNIEAAMAVYGEVGVRVVYARMFFDRMDGRIQGYVDALKARSPQVELCSIMEETAVAKDRITALSDQYHGTAGGRISVWPAPATTTTVTVEGMRWAQAFARDRAVMWTLHMAESDHDERILGGSPAEYMECYGLLDERLQVAHCVYFDRKDVRLLHRHNVKVASQVVSNAYLGSGVAPVPEMVERGMAVGIGTDNNNSSDSVNMIGDMKFMAHIHRAVHRDADVLTPEKILEMATIDGARSLGMDHEIGSIETGKRADLILLDLRHPQTTPHHHLAATIVFQAYGNEVDTVLIDGNVVMENRRLSFLPPERELAFLEEAQSRATAILQRANMVANPAWRSL

SEQ ID NO: 477 - protein, 473 aa, Artificial Sequence
  Description of Artificial Sequence: Synthetic peptide
MQTLSIQHGTLVTMDQYRRVLGDSWVHVQDGRIVALGVHAESVPPPADRVIDARGKVVLPGFINAHTHVNQILLRGGPSHGRQLYDWLFNVLYPGQKAMRPEVAVAVRLYCAEAVRSGITTINEEADSAIYPGNIEAAMAVYGEVGVRVVYARMFFDRMDGRIQGYVDALKARSPQVELCSIMEETAVAKDRITALSDQYHGTAGGRISVWPAPATTTTVTVEGMRWAQAFARDRAVMWTLHMAESDHDERILGWSPAEYMECYGLLDERLQVAHCVYFDRKDVRLLHRHNVKVASQVVSNAYLGSGVAPVPEMVERGMAVGIGTDNDNSCDSVNMIGDMKFMAHIHRAVHRDADVLTPEKILEMATIDGARSLGMDHEIGSIETGKRADLILLDLRHPQTTPHHHLAATIVFQAYGNEVDTVLIDGNVVMENRRLSFLPPERELAFLEEAQSRATAILQRANMVANPAWRSL

SEQ ID NO: 478 - protein, 473 aa, Artificial Sequence
  Description of Artificial Sequence: Synthetic peptide
MQTLSIQHGTLVTMDQYRRVLGDSWVHVQDGRIVALGVHAESVPPPADRVIDARGKVVLPGFINAHTHVNQILLRGGPSHGRQLYDWLFNVLYPGQKAMRPEVAVAVRLYCAEAVRSGITTINEEADSAIYPGNIEAAMAVYGEVGVRVVYARMFFDRMDGRIQGYVDALKARSPQVELCSIMEETAVAKDRITALSDQYHGTAGGRISVWPAPATTTTVTVEGMRWAQAFARDRAVMWTLHMAESDHDERILGWSPAEYMECYGLLDERLQVAHCVYFDRKDVRLLHRHNVKVASQVVSNAYLGSGVAPVPEMVERGMAVGIGTDNDNSSDSVNMIGDMKFMAHIHRAVHRDADVLTPEKILEMATIDGARSLGMDHEIGSIETGKRADLILLDLRHPQTTPHHHLAATIVFQAYGNEVDTVLIDGNVVMENRRLSFLPPERELAFLEEAQSRATAILQRANMVANPAWRSL

SEQ ID NO: 479 - protein, 473 aa, Artificial Sequence
  Description of Artificial Sequence: Synthetic peptide
MQTLSIQHGTLVTMDQYRRVLGDSWVHVQDGRIVALGVHAESVPPPADRVIDARGKVVLPGFINAHTHVNQILLRGGPSHGRQLYDWLFNVLYPGQKAMRPEVAVAVRLYCAEAVRSGITTINEEADSAIYPGNIEAAMAVYGEVGVRVVYARMFFDRMDGRIQGYVDALKARSPQVELCSIMEETAVAKDRITALSDQYHGTAGGRISVWPAPATTTTVTVEGMRWAQAFARDRAVMWTLHMAESDHDERILGWSPAEYMECYGLLDERLQVAHCVYFDRKDVRLLHRHNVKVASQVVSNAYLGSGVAPVPEMVERGMAVGIGTDNNNSCDSVNMIGDMKFMAHIHRAVHRDADVLTPEKILEMATIDGARSLGMDHEIGSIETGKRADLILLDLRHPQTTPHHHLAATIVFQAYGNEVDTVLIDGNVVMENRRLSFLPPERELAFLEEAQSRATAILQRANMVANPAWRSL

SEQ ID NO: 480 - protein, 473 aa, Artificial Sequence
  Description of Artificial Sequence: Synthetic peptide
MQTLSIQHGTLVTMDQYRRVLGDSWVHVQDGRIVALGVHAESVPPPADRVIDARGKVVLPGFINAHTHVNQILLRGGPSHGRQLYDWLFNVLYPGQKAMRPEVAVAVRLYCAEAVRSGITTINEEADSAIYPGNIEAAMAVYGEVGVRVVYARMFFDRMDGRIQGYVDALKARSPQVELCSIMEETAVAKDRITALSDQYHGTAGGRISVWPAPATTTTVTVEGMRWAQAFARDRAVMWTLHMAESDHDERILGWSPAEYMECYGLLDERLQVAHCVYFDRKDVRLLHRHNVKVASQVVSNAYLGSGVAPVPEMVERGMAVGIGTDNNNSSDSVNMIGDMKFMAHIHRAVHRDADVLTPEKILEMATIDGARSLGMDHEIGSIETGKRADLILLDLRHPQTTPHHHLAATIVFQAYGNEVDTVLIDGNVVMENRRLSFLPPERELAFLEEAQSRATAILQRANMVANPAWRSL

SEQ ID NO: 481 - protein, 473 aa, Artificial Sequence
  Description of Artificial Sequence: Synthetic peptide
MQTLSIQHGTLVTMDQYRRVLGDSWVHVQDGRIVALGVHAESVPPPADRVIDARGKVVLPGFINAHTHVNQILLRGGPSHGRQLYDWLFNVVYPGQKAMRPEVAVAVRLYCAEAVRSGITTINEDADSAIYPGNIEAAMAVYGEVGVRVVYARMFFDRMDGRIQGYVDALKARSPQVELCSIMEETAVAKDRITALSDQYHGTAGGRISVWPAPATITPVTVEGMRWAQAFARDRAVMWTLHMAESDHDERIIGGSPAEYMECYGLLDERLQVAHCVYFDRKDVRLLHRHNVKVASQVVSNAYLGSGVAPVPEMVERGMAVGIGTDNDNSCDSVNMIGDMKFMAHIHRAVHRDADVLTPEKILEMATIDGARSLGMDHEIGSIETGKRADLILLDLRHPQTTPHHHLAATIVFQAYGNEVDTVLIDGNVVMENRRLSFLPPERELAFLEEAQSRATAILQRANMVANPAWRSL

SEQ ID NO: 482 - protein, 473 aa, Artificial Sequence
  Description of Artificial Sequence: Synthetic peptide
MQTLSIQHGTLVTMDQYRRVLGDSWVHVQDGRIVALGVHAESVPPPADRVIDARGKVVLPGFINAHTHVNQILLRGGPSHGRQLYDWLFNVVYPGQKAMRPEVAVAVRLYCAEAVRSGITTINEDADSAIYPGNIEAAMAVYGEVGVRVVYARMFFDRMDGRIQGYVDALKARSPQVELCSIMEETAVAKDRITALSDQYHGTAGGRISVWPAPATITPVTVEGMRWAQAFARDRAVMWTLHMAESDHDERIIGGSPAEYMECYGLLDERLQVAHCVYFDRKDVRLLHRHNVKVASQVVSNAYLGSGVAPVPEMVERGMAVGIGTDNDNSSDSVNMIGDMKFMAHIHRAVHRDADVLTPEKILEMATIDGARSLGMDHEIGSIETGKRADLILLDLRHPQTTPHHHLAATIVFQAYGNEVDTVLIDGNVVMENRRLSFLPPERELAFLEEAQSRATAILQRANMVANPAWRSL

SEQ ID NO: 483 - protein, 473 aa, Artificial Sequence
  Description of Artificial Sequence: Synthetic peptide
MQTLSIQHGTLVTMDQYRRVLGDSWVHVQDGRIVALGVHAESVPPPADRVIDARGKVVLPGFINAHTHVNQILLRGGPSHGRQLYDWLFNVVYPGQKAMRPEVAVAVRLYCAEAVRSGITTINEDADSAIYPGNIEAAMAVYGEVGVRVVYARMFFDRMDGRIQGYVDALKARSPQVELCSIMEETAVAKDRITALSDQYHGTAGGRISVWPAPATITPVTVEGMRWAQAFARDRAVMWTLHMAESDHDERIIGGSPAEYMECYGLLDERLQVAHCVYFDRKDVRLLHRHNVKVASQVVSNAYLGSGVAPVPEMVERGMAVGIGTDNNNSCDSVNMIGDMKFMAHIHRAVHRDADVLTPEKILEMATIDGARSLGMDHEIGSIETGKRADLILLDLRHPQTTPHHHLAATIVFQAYGNEVDTVLIDGNVVMENRRLSFLPPERELAFLEEAQSRATAILQRANMVANPAWRSL

SEQ ID NO: 484 - protein, 473 aa, Artificial Sequence
  Description of Artificial Sequence: Synthetic peptide
MQTLSIQHGTLVTMDQYRRVLGDSWVHVQDGRIVALGVHAESVPPPADRVIDARGKVVLPGFINAHTHVNQILLRGGPSHGRQLYDWLFNVVYPGQKAMRPEVAVAVRLYCAEAVRSGITTINEDADSAIYPGNIEAAMAVYGEVGVRVVYARMFFDRMDGRIQGYVDALKARSPQVELCSIMEETAVAKDRITALSDQYHGTAGGRISVWPAPATITPVTVEGMRWAQAFARDRAVMWTLHMAESDHDERIIGGSPAEYMECYGLLDERLQVAHCVYFDRKDVRLLHRHNVKVASQVVSNAYLGSGVAPVPEMVERGMAVGIGTDNNNSSDSVNMIGDMKFMAHIHRAVHRDADVLTPEKILEMATIDGARSLGMDHEIGSIETGKRADLILLDLRHPQTTPHHHLAATIVFQAYGNEVDTVLIDGNVVMENRRLSFLPPERELAFLEEAQSRATAILQRANMVANPAWRSL

SEQ ID NO: 485 - protein, 473 aa, Artificial Sequence
  Description of Artificial Sequence: Synthetic peptide
MQTLSIQHGTLVTMDQYRRVLGDSWVHVQDGRIVALGVHAESVPPPADRVIDARGKVVLPGFINAHTHVNQILLRGGPSHGRQLYDWLFNVVYPGQKAMRPEVAVAVRLYCAEAVRSGITTINEDADSAIYPGNIEAAMAVYGEVGVRVVYARMFFDRMDGRIQGYVDALKARSPQVELCSIMEETAVAKDRITALSDQYHGTAGGRISVWPAPATITPVTVEGMRWAQAFARDRAVMWTLHMAESDHDERIIGWSPAEYMECYGLLDERLQVAHCVYFDRKDVRLLHRHNVKVASQVVSNAYLGSGVAPVPEMVERGMAVGIGTDNDNSCDSVNMIGDMKFMAHIHRAVHRDADVLTPEKILEMATIDGARSLGMDHEIGSIETGKRADLILLDLRHPQTTPHHHLAATIVFQAYGNEVDTVLIDGNVVMENRRLSFLPPERELAFLEEAQSRATAILQRANMVANPAWRSL

SEQ ID NO: 486 - protein, 473 aa, Artificial Sequence
  Description of Artificial Sequence: Synthetic peptide
MQTLSIQHGTLVTMDQYRRVLGDSWVHVQDGRIVALGVHAESVPPPADRVIDARGKVVLPGFINAHTHVNQILLRGGPSHGRQLYDWLFNVVYPGQKAMRPEVAVAVRLYCAEAVRSGITTINEDADSAIYPGNIEAAMAVYGEVGVRVVYARMFFDRMDGRIQGYVDALKARSPQVELCSIMEETAVAKDRITALSDQYHGTAGGRISVWPAPATITPVTVEGMRWAQAFARDRAVMWTLHMAESDHDERIIGWSPAEYMECYGLLDERLQVAHCVYFDRKDVRLLHRHNVKVASQVVSNAYLGSGVAPVPEMVERGMAVGIGTDNDNSSDSVNMIGDMKFMAHIHRAVHRDADVLTPEKILEMATIDGARSLGMDHEIGSIETGKRADLILLDLRHPQTTPHHHLAATIVFQAYGNEVDTVLIDGNVVMENRRLSFLPPERELAFLEEAQSRATAILQRANMVANPAWRSL

SEQ ID NO: 487 - protein, 473 aa, Artificial Sequence
  Description of Artificial Sequence: Synthetic peptide
MQTLSIQHGTLVTMDQYRRVLGDSWVHVQDGRIVALGVHAESVPPPADRVIDARGKVVLPGFINAHTHVNQILLRGGPSHGRQLYDWLFNVVYPGQKAMRPEVAVAVRLYCAEAVRSGITTINEDADSAIYPGNIEAAMAVYGEVGVRVVYARMFFDRMDGRIQGYVDALKARSPQVELCSIMEETAVAKDRITALSDQYHGTAGGRISVWPAPATITPVTVEGMRWAQAFARDRAVMWTLHMAESDHDERIIGWSPAEYMECYGLLDERLQVAHCVYFDRKDVRLLHRHNVKVASQVVSNAYLGSGVAPVPEMVERGMAVGIGTDNNNSCDSVNMIGDMKFMAHIHRAVHRDADVLTPEKILEMATIDGARSLGMDHEIGSIETGKRADLILLDLRHPQTTPHHHLAATIVFQAYGNEVDTVLIDGNVVMENRRLSFLPPERELAFLEEAQSRATAILQRANMVANPAWRSL

SEQ ID NO: 488 - protein, 473 aa, Artificial Sequence
  Description of Artificial Sequence: Synthetic peptide
MQTLSIQHGTLVTMDQYRRVLGDSWVHVQDGRIVALGVHAESVPPPADRVIDARGKVVLPGFINAHTHVNQILLRGGPSHGRQLYDWLFNVVYPGQKAMRPEVAVAVRLYCAEAVRSGITTINEDADSAIYPGNIEAAMAVYGEVGVRVVYARMFFDRMDGRIQGYVDALKARSPQVELCSIMEETAVAKDRITALSDQYHGTAGGRISVWPAPATITPVTVEGMRWAQAFARDRAVMWTLHMAESDHDERIIGWSPAEYMECYGLLDERLQVAHCVYFDRKDVRLLHRHNVKVASQVVSNAYLGSGVAPVPEMVERGMAVGIGTDNNNSSDSVNMIGDMKFMAHIHRAVHRDADVLTPEKILEMATIDGARSLGMDHEIGSIETGKRADLILLDLRHPQTTPHHHLAATIVFQAYGNEVDTVLIDGNVVMENRRLSFLPPERELAFLEEAQSRATAILQRANMVANPAWRSL

SEQ ID NO: 489 - protein, 473 aa, Artificial Sequence
  Description of Artificial Sequence: Synthetic peptide
MQTLSIQHGTLVTMDQYRRVLGDSWVHVQDGRIVALGVHAESVPPPADRVIDARGKVVLPGFINAHTHVNQILLRGGPSHGRQLYDWLFNVVYPGQKAMRPEVAVAVRLYCAEAVRSGITTINEDADSAIYPGNIEAAMAVYGEVGVRVVYARMFFDRMDGRIQGYVDALKARSPQVELCSIMEETAVAKDRITALSDQYHGTAGGRISVWPAPATITPVTVEGMRWAQAFARDRAVMWTLHMAESDHDERILGGSPAEYMECYGLLDERLQVAHCVYFDRKDVRLLHRHNVKVASQVVSNAYLGSGVAPVPEMVERGMAVGIGTDNDNSCDSVNMIGDMKFMAHIHRAVHRDADVLTPEKILEMATIDGARSLGMDHEIGSIETGKRADLILLDLRHPQTTPHHHLAATIVFQAYGNEVDTVLIDGNVVMENRRLSFLPPERELAFLEEAQSRATAILQRANMVANPAWRSL

SEQ ID NO: 490 - protein, 473 aa, Artificial Sequence
  Description of Artificial Sequence: Synthetic peptide
MQTLSIQHGTLVTMDQYRRVLGDSWVHVQDGRIVALGVHAESVPPPADRVIDARGKVVLPGFINAHTHVNQILLRGGPSHGRQLYDWLFNVVYPGQKAMRPEVAVAVRLYCAEAVRSGITTINEDADSAIYPGNIEAAMAVYGEVGVRVVYARMFFDRMDGRIQGYVDALKARSPQVELCSIMEETAVAKDRITALSDQYHGTAGGRISVWPAPATITPVTVEGMRWAQAFARDRAVMWTLHMAESDHDERILGGSPAEYMECYGLLDERLQVAHCVYFDRKDVRLLHRHNVKVASQVVSNAYLGSGVAPVPEMVERGMAVGIGTDNDNSSDSVNMIGDMKFMAHIHRAVHRDADVLTPEKILEMATIDGARSLGMDHEIGSIETGKRADLILLDLRHPQTTPHHHLAATIVFQAYGNEVDTVLIDGNVVMENRRLSFLPPERELAFLEEAQSRATAILQRANMVANPAWRSL

SEQ ID NO: 491 - protein, 473 aa, Artificial Sequence
  Description of Artificial Sequence: Synthetic peptide
MQTLSIQHGTLVTMDQYRRVLGDSWVHVQDGRIVALGVHAESVPPPADRVIDARGKVVLPGFINAHTHVNQILLRGGPSHGRQLYDWLFNVVYPGQKAMRPEVAVAVRLYCAEAVRSGITTINEDADSAIYPGNIEAAMAVYGEVGVRVVYARMFFDRMDGRIQGYVDALKARSPQVELCSIMEETAVAKDRITALSDQYHGTAGGRISVWPAPATITPVTVEGMRWAQAFARDRAVMWTLHMAESDHDERILGGSPAEYMECYGLLDERLQVAHCVYFDRKDVRLLHRHNVKVASQVVSNAYLGSGVAPVPEMVERGMAVGIGTDNNNSCDSVNMIGDMKFMAHIHRAVHRDADVLTPEKILEMATIDGARSLGMDHEIGSIETGKRADLILLDLRHPQTTPHHHLAATIVFQAYGNEVDTVLIDGNVVMENRRLSFLPPERELAFLEEAQSRATAILQRANMVANPAWRSL

SEQ ID NO: 492 - protein, 473 aa, Artificial Sequence
  Description of Artificial Sequence: Synthetic peptide
MQTLSIQHGTLVTMDQYRRVLGDSWVHVQDGRIVALGVHAESVPPPADRVIDARGKVVLPGFINAHTHVNQILLRGGPSHGRQLYDWLFNVVYPGQKAMRPEVAVAVRLYCAEAVRSGITTINEDADSAIYPGNIEAAMAVYGEVGVRVVYARMFFDRMDGRIQGYVDALKARSPQVELCSIMEETAVAKDRITALSDQYHGTAGGRISVWPAPATITPVTVEGMRWAQAFARDRAVMWTLHMAESDHDERILGGSPAEYMECYGLLDERLQVAHCVYFDRKDVRLLHRHNVKVASQVVSNAYLGSGVAPVPEMVERGMAVGIGTDNNNSSDSVNMIGDMKFMAHIHRAVHRDADVLTPEKILEMATIDGARSLGMDHEIGSIETGKRADLILLDLRHPQTTPHHHLAATIVFQAYGNEVDTVLIDGNVVMENRRLSFLPPERELAFLEEAQSRATAILQRANMVANPAWRSL

SEQ ID NO: 493 - protein, 473 aa, Artificial Sequence
  Description of Artificial Sequence: Synthetic peptide
MQTLSIQHGTLVTMDQYRRVLGDSWVHVQDGRIVALGVHAESVPPPADRVIDARGKVVLPGFINAHTHVNQILLRGGPSHGRQLYDWLFNVVYPGQKAMRPEVAVAVRLYCAEAVRSGITTINEDADSAIYPGNIEAAMAVYGEVGVRVVYARMFFDRMDGRIQGYVDALKARSPQVELCSIMEETAVAKDRITALSDQYHGTAGGRISVWPAPATITPVTVEGMRWAQAFARDRAVMWTLHMAESDHDERILGWSPAEYMECYGLLDERLQVAHCVYFDRKDVRLLHRHNVKVASQVVSNAYLGSGVAPVPEMVERGMAVGIGTDNDNSCDSVNMIGDMKFMAHIHRAVHRDADVLTPEKILEMATIDGARSLGMDHEIGSIETGKRADLILLDLRHPQTTPHHHLAATIVFQAYGNEVDTVLIDGNVVMENRRLSFLPPERELAFLEEAQSRATAILQRANMVANPAWRSL

SEQ ID NO: 494 - protein, 473 aa, Artificial Sequence
  Description of Artificial Sequence: Synthetic peptide
MQTLSIQHGTLVTMDQYRRVLGDSWVHVQDGRIVALGVHAESVPPPADRVIDARGKVVLPGFINAHTHVNQILLRGGPSHGRQLYDWLFNVVYPGQKAMRPEVAVAVRLYCAEAVRSGITTINEDADSAIYPGNIEAAMAVYGEVGVRVVYARMFFDRMDGRIQGYVDALKARSPQVELCSIMEETAVAKDRITALSDQYHGTAGGRISVWPAPATITPVTVEGMRWAQAFARDRAVMWTLHMAESDHDERILGWSPAEYMECYGLLDERLQVAHCVYFDRKDVRLLHRHNVKVASQVVSNAYLGSGVAPVPEMVERGMAVGIGTDNDNSSDSVNMIGDMKFMAHIHRAVHRDADVLTPEKILEMATIDGARSLGMDHEIGSIETGKRADLILLDLRHPQTTPHHHLAATIVFQAYGNEVDTVLIDGNVVMENRRLSFLPPERELAFLEEAQSRATAILQRANMVANPAWRSL

SEQ ID NO: 495 - protein, 473 aa, Artificial Sequence
  Description of Artificial Sequence: Synthetic peptide
MQTLSIQHGTLVTMDQYRRVLGDSWVHVQDGRIVALGVHAESVPPPADRVIDARGKVVLPGFINAHTHVNQILLRGGPSHGRQLYDWLFNVVYPGQKAMRPEVAVAVRLYCAEAVRSGITTINEDADSAIYPGNIEAAMAVYGEVGVRVVYARMFFDRMDGRIQGYVDALKARSPQVELCSIMEETAVAKDRITALSDQYHGTAGGRISVWPAPATITPVTVEGMRWAQAFARDRAVMWTLHMAESDHDERILGWSPAEYMECYGLLDERLQVAHCVYFDRKDVRLLHRHNVKVASQVVSNAYLGSGVAPVPEMVERGMAVGIGTDNNNSCDSVNMIGDMKFMAHIHRAVHRDADVLTPEKILEMATIDGARSLGMDHEIGSIETGKRADLILLDLRHPQTTPHHHLAATIVFQAYGNEVDTVLIDGNVVMENRRLSFLPPERELAFLEEAQSRATAILQRANMVANPAWRSL

SEQ ID NO: 496 - protein, 473 aa, Artificial Sequence
  Description of Artificial Sequence: Synthetic peptide
MQTLSIQHGTLVTMDQYRRVLGDSWVHVQDGRIVALGVHAESVPPPADRVIDARGKVVLPGFINAHTHVNQILLRGGPSHGRQLYDWLFNVVYPGQKAMRPEVAVAVRLYCAEAVRSGITTINEDADSAIYPGNIEAAMAVYGEVGVRVVYARMFFDRMDGRIQGYVDALKARSPQVELCSIMEETAVAKDRITALSDQYHGTAGGRISVWPAPATITPVTVEGMRWAQAFARDRAVMWTLHMAESDHDERILGWSPAEYMECYGLLDERLQVAHCVYFDRKDVRLLHRHNVKVASQVVSNAYLGSGVAPVPEMVERGMAVGIGTDNNNSSDSVNMIGDMKFMAHIHRAVHRDADVLTPEKILEMATIDGARSLGMDHEIGSIETGKRADLILLDLRHPQTTPHHHLAATIVFQAYGNEVDTVLIDGNVVMENRRLSFLPPERELAFLEEAQSRATAILQRANMVANPAWRSL

SEQ ID NO: 497 - protein, 473 aa, Artificial Sequence
  Description of Artificial Sequence: Synthetic peptide
MQTLSIQHGTLVTMDQYRRVLGDSWVHVQDGRIVALGVHAESVPPPADRVIDARGKVVLPGFINAHTHVNQILLRGGPSHGRQLYDWLFNVVYPGQKAMRPEVAVAVRLYCAEAVRSGITTINEDADSAIYPGNIEAAMAVYGEVGVRVVYARMFFDRMDGRIQGYVDALKARSPQVELCSIMEETAVAKDRITALSDQYHGTAGGRISVWPAPATITTVTVEGMRWAQAFARDRAVMWTLHMAESDHDERIIGGSPAEYMECYGLLDERLQVAHCVYFDRKDVRLLHRHNVKVASQVVSNAYLGSGVAPVPEMVERGMAVGIGTDNDNSCDSVNMIGDMKFMAHIHRAVHRDADVLTPEKILEMATIDGARSLGMDHEIGSIETGKRADLILLDLRHPQTTPHHHLAATIVFQAYGNEVDTVLIDGNVVMENRRLSFLPPERELAFLEEAQSRATAILQRANMVANPAWRSL

SEQ ID NO: 498 - protein, 473 aa, Artificial Sequence
  Description of Artificial Sequence: Synthetic peptide
MQTLSIQHGTLVTMDQYRRVLGDSWVHVQDGRIVALGVHAESVPPPADRVIDARGKVVLPGFINAHTHVNQILLRGGPSHGRQLYDWLFNVVYPGQKAMRPEVAVAVRLYCAEAVRSGITTINEDADSAIYPGNIEAAMAVYGEVGVRVVYARMFFDRMDGRIQGYVDALKARSPQVELCSIMEETAVAKDRITALSDQYHGTAGGRISVWPAPATITTVTVEGMRWAQAFARDRAVMWTLHMAESDHDERIIGGSPAEYMECYGLLDERLQVAHCVYFDRKDVRLLHRHNVKVASQVVSNAYLGSGVAPVPEMVERGMAVGIGTDNDNSSDSVNMIGDMKFMAHIHRAVHRDADVLTPEKILEMATIDGARSLGMDHEIGSIETGKRADLILLDLRHPQTTPHHHLAATIVFQAYGNEVDTVLIDGNVVMENRRLSFLPPERELAFLEEAQSRATAILQRANMVANPAWRSL

SEQ ID NO: 499 - protein, 473 aa, Artificial Sequence
  Description of Artificial Sequence: Synthetic peptide
MQTLSIQHGTLVTMDQYRRVLGDSWVHVQDGRIVALGVHAESVPPPADRVIDARGKVVLPGFINAHTHVNQILLRGGPSHGRQLYDWLFNVVYPGQKAMRPEVAVAVRLYCAEAVRSGITTINEDADSAIYPGNIEAAMAVYGEVGVRVVYARMFFDRMDGRIQGYVDALKARSPQVELCSIMEETAVAKDRITALSDQYHGTAGGRISVWPAPATITTVTVEGMRWAQAFARDRAVMWTLHMAESDHDERIIGGSPAEYMECYGLLDERLQVAHCVYFDRKDVRLLHRHNVKVASQVVSNAYLGSGVAPVPEMVERGMAVGIGTDNNNSCDSVNMIGDMKFMAHIHRAVHRDADVLTPEKILEMATIDGARSLGMDHEIGSIETGKRADLILLDLRHPQTTPHHHLAATIVFQAYGNEVDTVLIDGNVVMENRRLSFLPPERELAFLEEAQSRATAILQRANMVANPAWRSL

SEQ ID NO: 500 - protein, 473 aa, Artificial Sequence
  Description of Artificial Sequence: Synthetic peptide
MQTLSIQHGTLVTMDQYRRVLGDSWVHVQDGRIVALGVHAESVPPPADRVIDARGKVVLPGFINAHTHVNQILLRGGPSHGRQLYDWLFNVVYPGQKAMRPEVAVAVRLYCAEAVRSGITTINEDADSAIYPGNIEAAMAVYGEVGVRVVYARMFFDRMDGRIQGYVDALKARSPQVELCSIMEETAVAKDRITALSDQYHGTAGGRISVWPAPATITTVTVEGMRWAQAFARDRAVMWTLHMAESDHDERIIGGSPAEYMECYGLLDERLQVAHCVYFDRKDVRLLHRHNVKVASQVVSNAYLGSGVAPVPEMVERGMAVGIGTDNNNSSDSVNMIGDMKFMAHIHRAVHRDADVLTPEKILEMATIDGARSLGMDHEIGSIETGKRADLILLDLRHPQTTPHHHLAATIVFQAYGNEVDTVLIDGNVVMENRRLSFLPPERELAFLEEAQSRATAILQRANMVANPAWRSL

SEQ ID NO: 501 - protein, 473 aa, Artificial Sequence
  Description of Artificial Sequence: Synthetic peptide
MQTLSIQHGTLVTMDQYRRVLGDSWVHVQDGRIVALGVHAESVPPPADRVIDARGKVVLPGFINAHTHVNQILLRGGPSHGRQLYDWLFNVVYPGQKAMRPEVAVAVRLYCAEAVRSGITTINEDADSAIYPGNIEAAMAVYGEVGVRVVYARMFFDRMDGRIQGYVDALKARSPQVELCSIMEETAVAKDRITALSDQYHGTAGGRISVWPAPATITTVTVEGMRWAQAFARDRAVMWTLHMAESDHDERIIGWSPAEYMECYGLLDERLQVAHCVYFDRKDVRLLHRHNVKVASQVVSNAYLGSGVAPVPEMVERGMAVGIGTDNDNSCDSVNMIGDMKFMAHIHRAVHRDADVLTPEKILEMATIDGARSLGMDHEIGSIETGKRADLILLDLRHPQTTPHHHLAATIVFQAYGNEVDTVLIDGNVVMENRRLSFLPPERELAFLEEAQSRATAILQRANMVANPAWRSL

SEQ ID NO: 502 - protein, 473 aa, Artificial Sequence
  Description of Artificial Sequence: Synthetic peptide
MQTLSIQHGTLVTMDQYRRVLGDSWVHVQDGRIVALGVHAESVPPPADRVIDARGKVVLPGFINAHTHVNQILLRGGPSHGRQLYDWLFNVVYPGQKAMRPEVAVAVRLYCAEAVRSGITTINEDADSAIYPGNIEAAMAVYGEVGVRVVYARMFFDRMDGRIQGYVDALKARSPQVELCSIMEETAVAKDRITALSDQYHGTAGGRISVWPAPATITTVTVEGMRWAQAFARDRAVMWTLHMAESDHDERIIGWSPAEYMECYGLLDERLQVAHCVYFDRKDVRLLHRHNVKVASQVVSNAYLGSGVAPVPEMVERGMAVGIGTDNDNSSDSVNMIGDMKFMAHIHRAVHRDADVLTPEKILEMATIDGARSLGMDHEIGSIETGKRADLILLDLRHPQTTPHHHLAATIVFQAYGNEVDTVLIDGNVVMENRRLSFLPPERELAFLEEAQSRATAILQRANMVANPAWRSL

SEQ ID NO: 503 - protein, 473 aa, Artificial Sequence
  Description of Artificial Sequence: Synthetic peptide
MQTLSIQHGTLVTMDQYRRVLGDSWVHVQDGRIVALGVHAESVPPPADRVIDARGKVVLPGFINAHTHVNQILLRGGPSHGRQLYDWLFNVVYPGQKAMRPEVAVAVRLYCAEAVRSGITTINEDADSAIYPGNIEAAMAVYGEVGVRVVYARMFFDRMDGRIQGYVDALKARSPQVELCSIMEETAVAKDRITALSDQYHGTAGGRISVWPAPATITTVTVEGMRWAQAFARDRAVMWTLHMAESDHDERIIGWSPAEYMECYGLLDERLQVAHCVYFDRKDVRLLHRHNVKVASQVVSNAYLGSGVAPVPEMVERGMAVGIGTDNNNSCDSVNMIGDMKFMAHIHRAVHRDADVLTPEKILEMATIDGARSLGMDHEIGSIETGKRADLILLDLRHPQTTPHHHLAATIVFQAYGNEVDTVLIDGNVVMENRRLSFLPPERELAFLEEAQSRATAILQRANMVANPAWRSL

SEQ ID NO: 504 - protein, 473 aa, Artificial Sequence
  Description of Artificial Sequence: Synthetic peptide
MQTLSIQHGTLVTMDQYRRVLGDSWVHVQDGRIVALGVHAESVPPPADRVIDARGKVVLPGFINAHTHVNQILLRGGPSHGRQLYDWLFNVVYPGQKAMRPEVAVAVRLYCAEAVRSGITTINEDADSAIYPGNIEAAMAVYGEVGVRVVYARMFFDRMDGRIQGYVDALKARSPQVELCSIMEETAVAKDRITALSDQYHGTAGGRISVWPAPATITTVTVEGMRWAQAFARDRAVMWTLHMAESDHDERIIGWSPAEYMECYGLLDERLQVAHCVYFDRKDVRLLHRHNVKVASQVVSNAYLGSGVAPVPEMVERGMAVGIGTDNNNSSDSVNMIGDMKFMAHIHRAVHRDADVLTPEKILEMATIDGARSLGMDHEIGSIETGKRADLILLDLRHPQTTPHHHLAATIVFQAYGNEVDTVLIDGNVVMENRRLSFLPPERELAFLEEAQSRATAILQRANMVANPAWRSL

SEQ ID NO: 505 - protein, 473 aa, Artificial Sequence
  Description of Artificial Sequence: Synthetic peptide
MQTLSIQHGTLVTMDQYRRVLGDSWVHVQDGRIVALGVHAESVPPPADRVIDARGKVVLPGFINAHTHVNQILLRGGPSHGRQLYDWLFNVVYPGQKAMRPEVAVAVRLYCAEAVRSGITTINEDADSAIYPGNIEAAMAVYGEVGVRVVYARMFFDRMDGRIQGYVDALKARSPQVELCSIMEETAVAKDRITALSDQYHGTAGGRISVWPAPATITTVTVEGMRWAQAFARDRAVMWTLHMAESDHDERILGGSPAEYMECYGLLDERLQVAHCVYFDRKDVRLLHRHNVKVASQVVSNAYLGSGVAPVPEMVERGMAVGIGTDNDNSCDSVNMIGDMKFMAHIHRAVHRDADVLTPEKILEMATIDGARSLGMDHEIGSIETGKRADLILLDLRHPQTTPHHHLAATIVFQAYGNEVDTVLIDGNVVMENRRLSFLPPERELAFLEEAQSRATAILQRANMVANPAWRSL

SEQ ID NO: 506 - protein, 473 aa, Artificial Sequence
  Description of Artificial Sequence: Synthetic peptide
MQTLSIQHGTLVTMDQYRRVLGDSWVHVQDGRIVALGVHAESVPPPADRVIDARGKVVLPGFINAHTHVNQILLRGGPSHGRQLYDWLFNVVYPGQKAMRPEVAVAVRLYCAEAVRSGITTINEDADSAIYPGNIEAAMAVYGEVGVRVVYARMFFDRMDGRIQGYVDALKARSPQVELCSIMEETAVAKDRITALSDQYHGTAGGRISVWPAPATITTVTVEGMRWAQAFARDRAVMWTLHMAESDHDERILGGSPAEYMECYGLLDERLQVAHCVYFDRKDVRLLHRHNVKVASQVVSNAYLGSGVAPVPEMVERGMAVGIGTDNDNSSDSVNMIGDMKFMAHIHRAVHRDADVLTPEKILEMATIDGARSLGMDHEIGSIETGKRADLILLDLRHPQTTPHHHLAATIVFQAYGNEVDTVLIDGNVVMENRRLSFLPPERELAFLEEAQSRATAILQRANMVANPAWRSL

SEQ ID NO: 507 - protein, 473 aa, Artificial Sequence
  Description of Artificial Sequence: Synthetic peptide
MQTLSIQHGTLVTMDQYRRVLGDSWVHVQDGRIVALGVHAESVPPPADRVIDARGKVVLPGFINAHTHVNQILLRGGPSHGRQLYDWLFNVVYPGQKAMRPEVAVAVRLYCAEAVRSGITTINEDADSAIYPGNIEAAMAVYGEVGVRVVYARMFFDRMDGRIQGYVDALKARSPQVELCSIMEETAVAKDRITALSDQYHGTAGGRISVWPAPATITTVTVEGMRWAQAFARDRAVMWTLHMAESDHDERILGGSPAEYMECYGLLDERLQVAHCVYFDRKDVRLLHRHNVKVASQVVSNAYLGSGVAPVPEMVERGMAVGIGTDNNNSCDSVNMIGDMKFMAHIHRAVHRDADVLTPEKILEMATIDGARSLGMDHEIGSIETGKRADLILLDLRHPQTTPHHHLAATIVFQAYGNEVDTVLIDGNVVMENRRLSFLPPERELAFLEEAQSRATAILQRANMVANPAWRSL

SEQ ID NO: 508 - protein, 473 aa, Artificial Sequence
  Description of Artificial Sequence: Synthetic peptide
MQTLSIQHGTLVTMDQYRRVLGDSWVHVQDGRIVALGVHAESVPPPADRVIDARGKVVLPGFINAHTHVNQILLRGGPSHGRQLYDWLFNVVYPGQKAMRPEVAVAVRLYCAEAVRSGITTINEDADSAIYPGNIEAAMAVYGEVGVRVVYARMFFDRMDGRIQGYVDALKARSPQVELCSIMEETAVAKDRITALSDQYHGTAGGRISVWPAPATITTVTVEGMRWAQAFARDRAVMWTLHMAESDHDERILGGSPAEYMECYGLLDERLQVAHCVYFDRKDVRLLHRHNVKVASQVVSNAYLGSGVAPVPEMVERGMAVGIGTDNNNSSDSVNMIGDMKFMAHIHRAVHRDADVLTPEKILEMATIDGARSLGMDHEIGSIETGKRADLILLDLRHPQTTPHHHLAATIVFQAYGNEVDTVLIDGNVVMENRRLSFLPPERELAFLEEAQSRATAILQRANMVANPAWRSL

SEQ ID NO: 509 - protein, 473 aa, Artificial Sequence
  Description of Artificial Sequence: Synthetic peptide
MQTLSIQHGTLVTMDQYRRVLGDSWVHVQDGRIVALGVHAESVPPPADRVIDARGKVVLPGFINAHTHVNQILLRGGPSHGRQLYDWLFNVVYPGQKAMRPEVAVAVRLYCAEAVRSGITTINEDADSAIYPGNIEAAMAVYGEVGVRVVYARMFFDRMDGRIQGYVDALKARSPQVELCSIMEETAVAKDRITALSDQYHGTAGGRISVWPAPATITTVTVEGMRWAQAFARDRAVMWTLHMAESDHDERILGWSPAEYMECYGLLDERLQVAHCVYFDRKDVRLLHRHNVKVASQVVSNAYLGSGVAPVPEMVERGMAVGIGTDNDNSCDSVNMIGDMKFMAHIHRAVHRDADVLTPEKILEMATIDGARSLGMDHEIGSIETGKRADLILLDLRHPQTTPHHHLAATIVFQAYGNEVDTVLIDGNVVMENRRLSFLPPERELAFLEEAQSRATAILQRANMVANPAWRSL

SEQ ID NO: 510 - protein, 473 aa, Artificial Sequence
  Description of Artificial Sequence: Synthetic peptide
MQTLSIQHGTLVTMDQYRRVLGDSWVHVQDGRIVALGVHAESVPPPADRVIDARGKVVLPGFINAHTHVNQILLRGGPSHGRQLYDWLFNVVYPGQKAMRPEVAVAVRLYCAEAVRSGITTINEDADSAIYPGNIEAAMAVYGEVGVRVVYARMFFDRMDGRIQGYVDALKARSPQVELCSIMEETAVAKDRITALSDQYHGTAGGRISVWPAPATITTVTVEGMRWAQAFARDRAVMWTLHMAESDHDERILGWSPAEYMECYGLLDERLQVAHCVYFDRKDVRLLHRHNVKVASQVVSNAYLGSGVAPVPEMVERGMAVGIGTDNDNSSDSVNMIGDMKFMAHIHRAVHRDADVLTPEKILEMATIDGARSLGMDHEIGSIETGKRADLILLDLRHPQTTPHHHLAATIVFQAYGNEVDTVLIDGNVVMENRRLSFLPPERELAFLEEAQSRATAILQRANMVANPAWRSL

SEQ ID NO: 511 - protein, 473 aa, Artificial Sequence
  Description of Artificial Sequence: Synthetic peptide
MQTLSIQHGTLVTMDQYRRVLGDSWVHVQDGRIVALGVHAESVPPPADRVIDARGKVVLPGFINAHTHVNQILLRGGPSHGRQLYDWLFNVVYPGQKAMRPEVAVAVRLYCAEAVRSGITTINEDADSAIYPGNIEAAMAVYGEVGVRVVYARMFFDRMDGRIQGYVDALKARSPQVELCSIMEETAVAKDRITALSDQYHGTAGGRISVWPAPATITTVTVEGMRWAQAFARDRAVMWTLHMAESDHDERILGWSPAEYMECYGLLDERLQVAHCVYFDRKDVRLLHRHNVKVASQVVSNAYLGSGVAPVPEMVERGMAVGIGTDNNNSCDSVNMIGDMKFMAHIHRAVHRDADVLTPEKILEMATIDGARSLGMDHEIGSIETGKRADLILLDLRHPQTTPHHHLAATIVFQAYGNEVDTVLIDGNVVMENRRLSFLPPERELAFLEEAQSRATAILQRANMVANPAWRSL

SEQ ID NO: 512 - protein, 473 aa, Artificial Sequence
  Description of Artificial Sequence: Synthetic peptide
MQTLSIQHGTLVTMDQYRRVLGDSWVHVQDGRIVALGVHAESVPPPADRVIDARGKVVLPGFINAHTHVNQILLRGGPSHGRQLYDWLFNVVYPGQKAMRPEVAVAVRLYCAEAVRSGITTINEDADSAIYPGNIEAAMAVYGEVGVRVVYARMFFDRMDGRIQGYVDALKARSPQVELCSIMEETAVAKDRITALSDQYHGTAGGRISVWPAPATITTVTVEGMRWAQAFARDRAVMWTLHMAESDHDERILGWSPAEYMECYGLLDERLQVAHCVYFDRKDVRLLHRHNVKVASQVVSNAYLGSGVAPVPEMVERGMAVGIGTDNNNSSDSVNMIGDMKFMAHIHRAVHRDADVLTPEKILEMATIDGARSLGMDHEIGSIETGKRADLILLDLRHPQTTPHHHLAATIVFQAYGNEVDTVLIDGNVVMENRRLSFLPPERELAFLEEAQSRATAILQRANMVANPAWRSL

SEQ ID NO: 513 - protein, 473 aa, Artificial Sequence
  Description of Artificial Sequence: Synthetic peptide
MQTLSIQHGTLVTMDQYRRVLGDSWVHVQDGRIVALGVHAESVPPPADRVIDARGKVVLPGFINAHTHVNQILLRGGPSHGRQLYDWLFNVVYPGQKAMRPEVAVAVRLYCAEAVRSGITTINEDADSAIYPGNIEAAMAVYGEVGVRVVYARMFFDRMDGRIQGYVDALKARSPQVELCSIMEETAVAKDRITALSDQYHGTAGGRISVWPAPATTTPVTVEGMRWAQAFARDRAVMWTLHMAESDHDERIIGGSPAEYMECYGLLDERLQVAHCVYFDRKDVRLLHRHNVKVASQVVSNAYLGSGVAPVPEMVERGMAVGIGTDNDNSCDSVNMIGDMKFMAHIHRAVHRDADVLTPEKILEMATIDGARSLGMDHEIGSIETGKRADLILLDLRHPQTTPHHHLAATIVFQAYGNEVDTVLIDGNVVMENRRLSFLPPERELAFLEEAQSRATAILQRANMVANPAWRSL

SEQ ID NO: 514 - protein, 473 aa, Artificial Sequence
  Description of Artificial Sequence: Synthetic peptide
MQTLSIQHGTLVTMDQYRRVLGDSWVHVQDGRIVALGVHAESVPPPADRVIDARGKVVLPGFINAHTHVNQILLRGGPSHGRQLYDWLFNVVYPGQKAMRPEVAVAVRLYCAEAVRSGITTINEDADSAIYPGNIEAAMAVYGEVGVRVVYARMFFDRMDGRIQGYVDALKARSPQVELCSIMEETAVAKDRITALSDQYHGTAGGRISVWPAPATTTPVTVEGMRWAQAFARDRAVMWTLHMAESDHDERIIGGSPAEYMECYGLLDERLQVAHCVYFDRKDVRLLHRHNVKVASQVVSNAYLGSGVAPVPEMVERGMAVGIGTDNDNSSDSVNMIGDMKFMAHIHRAVHRDADVLTPEKILEMATIDGARSLGMDHEIGSIETGKRADLILLDLRHPQTTPHHHLAATIVFQAYGNEVDTVLIDGNVVMENRRLSFLPPERELAFLEEAQSRATAILQRANMVANPAWRSL

SEQ ID NO: 515 - protein, 473 aa, Artificial Sequence
  Description of Artificial Sequence: Synthetic peptide
MQTLSIQHGTLVTMDQYRRVLGDSWVHVQDGRIVALGVHAESVPPPADRVIDARGKVVLPGFINAHTHVNQILLRGGPSHGRQLYDWLFNVVYPGQKAMRPEVAVAVRLYCAEAVRSGITTINEDADSAIYPGNIEAAMAVYGEVGVRVVYARMFFDRMDGRIQGYVDALKARSPQVELCSIMEETAVAKDRITALSDQYHGTAGGRISVWPAPATTTPVTVEGMRWAQAFARDRAVMWTLHMAESDHDERIIGGSPAEYMECYGLLDERLQVAHCVYFDRKDVRLLHRHNVKVASQVVSNAYLGSGVAPVPEMVERGMAVGIGTDNNNSCDSVNMIGDMKFMAHIHRAVHRDADVLTPEKILEMATIDGARSLGMDHEIGSIETGKRADLILLDLRHPQTTPHHHLAATIVFQAYGNEVDTVLIDGNVVMENRRLSFLPPERELAFLEEAQSRATAILQRANMVANPAWRSL

SEQ ID NO: 516 - protein, 473 aa, Artificial Sequence
  Description of Artificial Sequence: Synthetic peptide
MQTLSIQHGTLVTMDQYRRVLGDSWVHVQDGRIVALGVHAESVPPPADRVIDARGKVVLPGFINAHTHVNQILLRGGPSHGRQLYDWLFNVVYPGQKAMRPEVAVAVRLYCAEAVRSGITTINEDADSAIYPGNIEAAMAVYGEVGVRVVYARMFFDRMDGRIQGYVDALKARSPQVELCSIMEETAVAKDRITALSDQYHGTAGGRISVWPAPATTTPVTVEGMRWAQAFARDRAVMWTLHMAESDHDERIIGGSPAEYMECYGLLDERLQVAHCVYFDRKDVRLLHRHNVKVASQVVSNAYLGSGVAPVPEMVERGMAVGIGTDNNNSSDSVNMIGDMKFMAHIHRAVHRDADVLTPEKILEMATIDGARSLGMDHEIGSIETGKRADLILLDLRHPQTTPHHHLAATIVFQAYGNEVDTVLIDGNVVMENRRLSFLPPERELAFLEEAQSRATAILQRANMVANPAWRSL

SEQ ID NO: 517 - protein, 473 aa, Artificial Sequence
  Description of Artificial Sequence: Synthetic peptide
MQTLSIQHGTLVTMDQYRRVLGDSWVHVQDGRIVALGVHAESVPPPADRVIDARGKVVLPGFINAHTHVNQILLRGGPSHGRQLYDWLFNVVYPGQKAMRPEVAVAVRLYCAEAVRSGITTINEDADSAIYPGNIEAAMAVYGEVGVRVVYARMFFDRMDGRIQGYVDALKARSPQVELCSIMEETAVAKDRITALSDQYHGTAGGRISVWPAPATTTPVTVEGMRWAQAFARDRAVMWTLHMAESDHDERIIGWSPAEYMECYGLLDERLQVAHCVYFDRKDVRLLHRHNVKVASQVVSNAYLGSGVAPVPEMVERGMAVGIGTDNDNSCDSVNMIGDMKFMAHIHRAVHRDADVLTPEKILEMATIDGARSLGMDHEIGSIETGKRADLILLDLRHPQTTPHHHLAATIVFQAYGNEVDTVLIDGNVVMENRRLSFLPPERELAFLEEAQSRATAILQRANMVANPAWRSL

SEQ ID NO: 518 - protein, 473 aa, Artificial Sequence
  Description of Artificial Sequence: Synthetic peptide
MQTLSIQHGTLVTMDQYRRVLGDSWVHVQDGRIVALGVHAESVPPPADRVIDARGKVVLPGFINAHTHVNQILLRGGPSHGRQLYDWLFNVVYPGQKAMRPEVAVAVRLYCAEAVRSGITTINEDADSAIYPGNIEAAMAVYGEVGVRVVYARMFFDRMDGRIQGYVDALKARSPQVELCSIMEETAVAKDRITALSDQYHGTAGGRISVWPAPATTTPVTVEGMRWAQAFARDRAVMWTLHMAESDHDERIIGWSPAEYMECYGLLDERLQVAHCVYFDRKDVRLLHRHNVKVASQVVSNAYLGSGVAPVPEMVERGMAVGIGTDNDNSSDSVNMIGDMKFMAHIHRAVHRDADVLTPEKILEMATIDGARSLGMDHEIGSIETGKRADLILLDLRHPQTTPHHHLAATIVFQAYGNEVDTVLIDGNVVMENRRLSFLPPERELAFLEEAQSRATAILQRANMVANPAWRSL

SEQ ID NO: 519 - protein, 473 aa, Artificial Sequence
  Description of Artificial Sequence: Synthetic peptide
MQTLSIQHGTLVTMDQYRRVLGDSWVHVQDGRIVALGVHAESVPPPADRVIDARGKVVLPGFINAHTHVNQILLRGGPSHGRQLYDWLFNVVYPGQKAMRPEVAVAVRLYCAEAVRSGITTINEDADSAIYPGNIEAAMAVYGEVGVRVVYARMFFDRMDGRIQGYVDALKARSPQVELCSIMEETAVAKDRITALSDQYHGTAGGRISVWPAPATTTPVTVEGMRWAQAFARDRAVMWTLHMAESDHDERIIGWSPAEYMECYGLLDERLQVAHCVYFDRKDVRLLHRHNVKVASQVVSNAYLGSGVAPVPEMVERGMAVGIGTDNNNSCDSVNMIGDMKFMAHIHRAVHRDADVLTPEKILEMATIDGARSLGMDHEIGSIETGKRADLILLDLRHPQTTPHHHLAATIVFQAYGNEVDTVLIDGNVVMENRRLSFLPPERELAFLEEAQSRATAILQRANMVANPAWRSL

SEQ ID NO: 520 - protein, 473 aa, Artificial Sequence
  Description of Artificial Sequence: Synthetic peptide
MQTLSIQHGTLVTMDQYRRVLGDSWVHVQDGRIVALGVHAESVPPPADRVIDARGKVVLPGFINAHTHVNQILLRGGPSHGRQLYDWLFNVVYPGQKAMRPEVAVAVRLYCAEAVRSGITTINEDADSAIYPGNIEAAMAVYGEVGVRVVYARMFFDRMDGRIQGYVDALKARSPQVELCSIMEETAVAKDRITALSDQYHGTAGGRISVWPAPATTTPVTVEGMRWAQAFARDRAVMWTLHMAESDHDERIIGWSPAEYMECYGLLDERLQVAHCVYFDRKDVRLLHRHNVKVASQVVSNAYLGSGVAPVPEMVERGMAVGIGTDNNNSSDSVNMIGDMKFMAHIHRAVHRDADVLTPEKILEMATIDGARSLGMDHEIGSIETGKRADLILLDLRHPQTTPHHHLAATIVFQAYGNEVDTVLIDGNVVMENRRLSFLPPERELAFLEEAQSRATAILQRANMVANPAWRSL

SEQ ID NO: 521 - protein, 473 aa, Artificial Sequence
  Description of Artificial Sequence: Synthetic peptide
MQTLSIQHGTLVTMDQYRRVLGDSWVHVQDGRIVALGVHAESVPPPADRVIDARGKVVLPGFINAHTHVNQILLRGGPSHGRQLYDWLFNVVYPGQKAMRPEVAVAVRLYCAEAVRSGITTINEDADSAIYPGNIEAAMAVYGEVGVRVVYARMFFDRMDGRIQGYVDALKARSPQVELCSIMEETAVAKDRITALSDQYHGTAGGRISVWPAPATTTPVTVEGMRWAQAFARDRAVMWTLHMAESDHDERILGGSPAEYMECYGLLDERLQVAHCVYFDRKDVRLLHRHNVKVASQVVSNAYLGSGVAPVPEMVERGMAVGIGTDNDNSCDSVNMIGDMKFMAHIHRAVHRDADVLTPEKILEMATIDGARSLGMDHEIGSIETGKRADLILLDLRHPQTTPHHHLAATIVFQAYGNEVDTVLIDGNVVMENRRLSFLPPERELAFLEEAQSRATAILQRANMVANPAWRSL

SEQ ID NO: 522 - protein, 473 aa, Artificial Sequence
  Description of Artificial Sequence: Synthetic peptide
MQTLSIQHGTLVTMDQYRRVLGDSWVHVQDGRIVALGVHAESVPPPADRVIDARGKVVLPGFINAHTHVNQILLRGGPSHGRQLYDWLFNVVYPGQKAMRPEVAVAVRLYCAEAVRSGITTINEDADSAIYPGNIEAAMAVYGEVGVRVVYARMFFDRMDGRIQGYVDALKARSPQVELCSIMEETAVAKDRITALSDQYHGTAGGRISVWPAPATTTPVTVEGMRWAQAFARDRAVMWTLHMAESDHDERILGGSPAEYMECYGLLDERLQVAHCVYFDRKDVRLLHRHNVKVASQVVSNAYLGSGVAPVPEMVERGMAVGIGTDNDNSSDSVNMIGDMKFMAHIHRAVHRDADVLTPEKILEMATIDGARSLGMDHEIGSIETGKRADLILLDLRHPQTTPHHHLAATIVFQAYGNEVDTVLIDGNVVMENRRLSFLPPERELAFLEEAQSRATAILQRANMVANPAWRSL

SEQ ID NO: 523 - protein, 473 aa, Artificial Sequence
  Description of Artificial Sequence: Synthetic peptide
MQTLSIQHGTLVTMDQYRRVLGDSWVHVQDGRIVALGVHAESVPPPADRVIDARGKVVLPGFINAHTHVNQILLRGGPSHGRQLYDWLFNVVYPGQKAMRPEVAVAVRLYCAEAVRSGITTINEDADSAIYPGNIEAAMAVYGEVGVRVVYARMFFDRMDGRIQGYVDALKARSPQVELCSIMEETAVAKDRITALSDQYHGTAGGRISVWPAPATTTPVTVEGMRWAQAFARDRAVMWTLHMAESDHDERILGGSPAEYMECYGLLDERLQVAHCVYFDRKDVRLLHRHNVKVASQVVSNAYLGSGVAPVPEMVERGMAVGIGTDNNNSCDSVNMIGDMKFMAHIHRAVHRDADVLTPEKILEMATIDGARSLGMDHEIGSIETGKRADLILLDLRHPQTTPHHHLAATIVFQAYGNEVDTVLIDGNVVMENRRLSFLPPERELAFLEEAQSRATAILQRANMVANPAWRSL

SEQ ID NO: 524 - protein, 473 aa, Artificial Sequence
  Description of Artificial Sequence: Synthetic peptide
MQTLSIQHGTLVTMDQYRRVLGDSWVHVQDGRIVALGVHAESVPPPADRVIDARGKVVLPGFINAHTHVNQILLRGGPSHGRQLYDWLFNVVYPGQKAMRPEVAVAVRLYCAEAVRSGITTINEDADSAIYPGNIEAAMAVYGEVGVRVVYARMFFDRMDGRIQGYVDALKARSPQVELCSIMEETAVAKDRITALSDQYHGTAGGRISVWPAPATTTPVTVEGMRWAQAFARDRAVMWTLHMAESDHDERILGGSPAEYMECYGLLDERLQVAHCVYFDRKDVRLLHRHNVKVASQVVSNAYLGSGVAPVPEMVERGMAVGIGTDNNNSSDSVNMIGDMKFMAHIHRAVHRDADVLTPEKILEMATIDGARSLGMDHEIGSIETGKRADLILLDLRHPQTTPHHHLAATIVFQAYGNEVDTVLIDGNVVMENRRLSFLPPERELAFLEEAQSRATAILQRANMVANPAWRSL

SEQ ID NO: 525 - protein, 473 aa, Artificial Sequence
  Description of Artificial Sequence: Synthetic peptide
MQTLSIQHGTLVTMDQYRRVLGDSWVHVQDGRIVALGVHAESVPPPADRVIDARGKVVLPGFINAHTHVNQILLRGGPSHGRQLYDWLFNVVYPGQKAMRPEVAVAVRLYCAEAVRSGITTINEDADSAIYPGNIEAAMAVYGEVGVRVVYARMFFDRMDGRIQGYVDALKARSPQVELCSIMEETAVAKDRITALSDQYHGTAGGRISVWPAPATTTPVTVEGMRWAQAFARDRAVMWTLHMAESDHDERILGWSPAEYMECYGLLDERLQVAHCVYFDRKDVRLLHRHNVKVASQVVSNAYLGSGVAPVPEMVERGMAVGIGTDNDNSCDSVNMIGDMKFMAHIHRAVHRDADVLTPEKILEMATIDGARSLGMDHEIGSIETGKRADLILLDLRHPQTTPHHHLAATIVFQAYGNEVDTVLIDGNVVMENRRLSFLPPERELAFLEEAQSRATAILQRANMVANPAWRSL

SEQ ID NO: 526 - protein, 473 aa, Artificial Sequence
  Description of Artificial Sequence: Synthetic peptide
MQTLSIQHGTLVTMDQYRRVLGDSWVHVQDGRIVALGVHAESVPPPADRVIDARGKVVLPGFINAHTHVNQILLRGGPSHGRQLYDWLFNVVYPGQKAMRPEVAVAVRLYCAEAVRSGITTINEDADSAIYPGNIEAAMAVYGEVGVRVVYARMFFDRMDGRIQGYVDALKARSPQVELCSIMEETAVAKDRITALSDQYHGTAGGRISVWPAPATTTPVTVEGMRWAQAFARDRAVMWTLHMAESDHDERILGWSPAEYMECYGLLDERLQVAHCVYFDRKDVRLLHRHNVKVASQVVSNAYLGSGVAPVPEMVERGMAVGIGTDNDNSSDSVNMIGDMKFMAHIHRAVHRDADVLTPEKILEMATIDGARSLGMDHEIGSIETGKRADLILLDLRHPQTTPHHHLAATIVFQAYGNEVDTVLIDGNVVMENRRLSFLPPERELAFLEEAQSRATAILQRANMVANPAWRSL

SEQ ID NO: 527 - protein, 473 aa, Artificial Sequence
  Description of Artificial Sequence: Synthetic peptide
MQTLSIQHGTLVTMDQYRRVLGDSWVHVQDGRIVALGVHAESVPPPADRVIDARGKVVLPGFINAHTHVNQILLRGGPSHGRQLYDWLFNVVYPGQKAMRPEVAVAVRLYCAEAVRSGITTINEDADSAIYPGNIEAAMAVYGEVGVRVVYARMFFDRMDGRIQGYVDALKARSPQVELCSIMEETAVAKDRITALSDQYHGTAGGRISVWPAPATTTPVTVEGMRWAQAFARDRAVMWTLHMAESDHDERILGWSPAEYMECYGLLDERLQVAHCVYFDRKDVRLLHRHNVKVASQVVSNAYLGSGVAPVPEMVERGMAVGIGTDNNNSCDSVNMIGDMKFMAHIHRAVHRDADVLTPEKILEMATIDGARSLGMDHEIGSIETGKRADLILLDLRHPQTTPHHHLAATIVFQAYGNEVDTVLIDGNVVMENRRLSFLPPERELAFLEEAQSRATAILQRANMVANPAWRSL

SEQ ID NO: 528 - protein, 473 aa, Artificial Sequence
  Description of Artificial Sequence: Synthetic peptide
MQTLSIQHGTLVTMDQYRRVLGDSWVHVQDGRIVALGVHAESVPPPADRVIDARGKVVLPGFINAHTHVNQILLRGGPSHGRQLYDWLFNVVYPGQKAMRPEVAVAVRLYCAEAVRSGITTINEDADSAIYPGNIEAAMAVYGEVGVRVVYARMFFDRMDGRIQGYVDALKARSPQVELCSIMEETAVAKDRITALSDQYHGTAGGRISVWPAPATTTPVTVEGMRWAQAFARDRAVMWTLHMAESDHDERILGWSPAEYMECYGLLDERLQVAHCVYFDRKDVRLLHRHNVKVASQVVSNAYLGSGVAPVPEMVERGMAVGIGTDNNNSSDSVNMIGDMKFMAHIHRAVHRDADVLTPEKILEMATIDGARSLGMDHEIGSIETGKRADLILLDLRHPQTTPHHHLAATIVFQAYGNEVDTVLIDGNVVMENRRLSFLPPERELAFLEEAQSRATAILQRANMVANPAWRSL

SEQ ID NO: 529 - protein, 473 aa, Artificial Sequence
  Description of Artificial Sequence: Synthetic peptide
MQTLSIQHGTLVTMDQYRRVLGDSWVHVQDGRIVALGVHAESVPPPADRVIDARGKVVLPGFINAHTHVNQILLRGGPSHGRQLYDWLFNVVYPGQKAMRPEVAVAVRLYCAEAVRSGITTINEDADSAIYPGNIEAAMAVYGEVGVRVVYARMFFDRMDGRIQGYVDALKARSPQVELCSIMEETAVAKDRITALSDQYHGTAGGRISVWPAPATTTTVTVEGMRWAQAFARDRAVMWTLHMAESDHDERIIGGSPAEYMECYGLLDERLQVAHCVYFDRKDVRLLHRHNVKVASQVVSNAYLGSGVAPVPEMVERGMAVGIGTDNDNSCDSVNMIGDMKFMAHIHRAVHRDADVLTPEKILEMATIDGARSLGMDHEIGSIETGKRADLILLDLRHPQTTPHHHLAATIVFQAYGNEVDTVLIDGNVVMENRRLSFLPPERELAFLEEAQSRATAILQRANMVANPAWRSL

SEQ ID NO: 530 - protein, 473 aa, Artificial Sequence
  Description of Artificial Sequence: Synthetic peptide
MQTLSIQHGTLVTMDQYRRVLGDSWVHVQDGRIVALGVHAESVPPPADRVIDARGKVVLPGFINAHTHVNQILLRGGPSHGRQLYDWLFNVVYPGQKAMRPEVAVAVRLYCAEAVRSGITTINEDADSAIYPGNIEAAMAVYGEVGVRVVYARMFFDRMDGRIQGYVDALKARSPQVELCSIMEETAVAKDRITALSDQYHGTAGGRISVWPAPATTTTVTVEGMRWAQAFARDRAVMWTLHMAESDHDERIIGGSPAEYMECYGLLDERLQVAHCVYFDRKDVRLLHRHNVKVASQVVSNAYLGSGVAPVPEMVERGMAVGIGTDNDNSSDSVNMIGDMKFMAHIHRAVHRDADVLTPEKILEMATIDGARSLGMDHEIGSIETGKRADLILLDLRHPQTTPHHHLAATIVFQAYGNEVDTVLIDGNVVMENRRLSFLPPERELAFLEEAQSRATAILQRANMVANPAWRSL

SEQ ID NO: 531 - protein, 473 aa, Artificial Sequence
  Description of Artificial Sequence: Synthetic peptide
MQTLSIQHGTLVTMDQYRRVLGDSWVHVQDGRIVALGVHAESVPPPADRVIDARGKVVLPGFINAHTHVNQILLRGGPSHGRQLYDWLFNVVYPGQKAMRPEVAVAVRLYCAEAVRSGITTINEDADSAIYPGNIEAAMAVYGEVGVRVVYARMFFDRMDGRIQGYVDALKARSPQVELCSIMEETAVAKDRITALSDQYHGTAGGRISVWPAPATTTTVTVEGMRWAQAFARDRAVMWTLHMAESDHDERIIGGSPAEYMECYGLLDERLQVAHCVYFDRKDVRLLHRHNVKVASQVVSNAYLGSGVAPVPEMVERGMAVGIGTDNNNSCDSVNMIGDMKFMAHIHRAVHRDADVLTPEKILEMATIDGARSLGMDHEIGSIETGKRADLILLDLRHPQTTPHHHLAATIVFQAYGNEVDTVLIDGNVVMENRRLSFLPPERELAFLEEAQSRATAILQRANMVANPAWRSL

SEQ ID NO: 532 - protein, 473 aa, Artificial Sequence
  Description of Artificial Sequence: Synthetic peptide
MQTLSIQHGTLVTMDQYRRVLGDSWVHVQDGRIVALGVHAESVPPPADRVIDARGKVVLPGFINAHTHVNQILLRGGPSHGRQLYDWLFNVVYPGQKAMRPEVAVAVRLYCAEAVRSGITTINEDADSAIYPGNIEAAMAVYGEVGVRVVYARMFFDRMDGRIQGYVDALKARSPQVELCSIMEETAVAKDRITALSDQYHGTAGGRISVWPAPATTTTVTVEGMRWAQAFARDRAVMWTLHMAESDHDERIIGGSPAEYMECYGLLDERLQVAHCVYFDRKDVRLLHRHNVKVASQVVSNAYLGSGVAPVPEMVERGMAVGIGTDNNNSSDSVNMIGDMKFMAHIHRAVHRDADVLTPEKILEMATIDGARSLGMDHEIGSIETGKRADLILLDLRHPQTTPHHHLAATIVFQAYGNEVDTVLIDGNVVMENRRLSFLPPERELAFLEEAQSRATAILQRANMVANPAWRSL

SEQ ID NO: 533 - protein, 473 aa, Artificial Sequence
  Description of Artificial Sequence: Synthetic peptide
MQTLSIQHGTLVTMDQYRRVLGDSWVHVQDGRIVALGVHAESVPPPADRVIDARGKVVLPGFINAHTHVNQILLRGGPSHGRQLYDWLFNVVYPGQKAMRPEVAVAVRLYCAEAVRSGITTINEDADSAIYPGNIEAAMAVYGEVGVRVVYARMFFDRMDGRIQGYVDALKARSPQVELCSIMEETAVAKDRITALSDQYHGTAGGRISVWPAPATTTTVTVEGMRWAQAFARDRAVMWTLHMAESDHDERIIGWSPAEYMECYGLLDERLQVAHCVYFDRKDVRLLHRHNVKVASQVVSNAYLGSGVAPVPEMVERGMAVGIGTDNDNSCDSVNMIGDMKFMAHIHRAVHRDADVLTPEKILEMATIDGARSLGMDHEIGSIETGKRADLILLDLRHPQTTPHHHLAATIVFQAYGNEVDTVLIDGNVVMENRRLSFLPPERELAFLEEAQSRATAILQRANMVANPAWRSL

SEQ ID NO: 534 - protein, 473 aa, Artificial Sequence
  Description of Artificial Sequence: Synthetic peptide
MQTLSIQHGTLVTMDQYRRVLGDSWVHVQDGRIVALGVHAESVPPPADRVIDARGKVVLPGFINAHTHVNQILLRGGPSHGRQLYDWLFNVVYPGQKAMRPEVAVAVRLYCAEAVRSGITTINEDADSAIYPGNIEAAMAVYGEVGVRVVYARMFFDRMDGRIQGYVDALKARSPQVELCSIMEETAVAKDRITALSDQYHGTAGGRISVWPAPATTTTVTVEGMRWAQAFARDRAVMWTLHMAESDHDERIIGWSPAEYMECYGLLDERLQVAHCVYFDRKDVRLLHRHNVKVASQVVSNAYLGSGVAPVPEMVERGMAVGIGTDNDNSSDSVNMIGDMKFMAHIHRAVHRDADVLTPEKILEMATIDGARSLGMDHEIGSIETGKRADLILLDLRHPQTTPHHHLAATIVFQAYGNEVDTVLIDGNVVMENRRLSFLPPERELAFLEEAQSRATAILQRANMVANPAWRSL

SEQ ID NO: 535 - protein, 473 aa, Artificial Sequence
  Description of Artificial Sequence: Synthetic peptide
MQTLSIQHGTLVTMDQYRRVLGDSWVHVQDGRIVALGVHAESVPPPADRVIDARGKVVLPGFINAHTHVNQILLRGGPSHGRQLYDWLFNVVYPGQKAMRPEVAVAVRLYCAEAVRSGITTINEDADSAIYPGNIEAAMAVYGEVGVRVVYARMFFDRMDGRIQGYVDALKARSPQVELCSIMEETAVAKDRITALSDQYHGTAGGRISVWPAPATTTTVTVEGMRWAQAFARDRAVMWTLHMAESDHDERIIGWSPAEYMECYGLLDERLQVAHCVYFDRKDVRLLHRHNVKVASQVVSNAYLGSGVAPVPEMVERGMAVGIGTDNNNSCDSVNMIGDMKFMAHIHRAVHRDADVLTPEKILEMATIDGARSLGMDHEIGSIETGKRADLILLDLRHPQTTPHHHLAATIVFQAYGNEVDTVLIDGNVVMENRRLSFLPPERELAFLEEAQSRATAILQRANMVANPAWRSL

SEQ ID NO: 536 - protein, 473 aa, Artificial Sequence
  Description of Artificial Sequence: Synthetic peptide
MQTLSIQHGTLVTMDQYRRVLGDSWVHVQDGRIVALGVHAESVPPPADRVIDARGKVVLPGFINAHTHVNQILLRGGPSHGRQLYDWLFNVVYPGQKAMRPEVAVAVRLYCAEAVRSGITTINEDADSAIYPGNIEAAMAVYGEVGVRVVYARMFFDRMDGRIQGYVDALKARSPQVELCSIMEETAVAKDRITALSDQYHGTAGGRISVWPAPATTTTVTVEGMRWAQAFARDRAVMWTLHMAESDHDERIIGWSPAEYMECYGLLDERLQVAHCVYFDRKDVRLLHRHNVKVASQVVSNAYLGSGVAPVPEMVERGMAVGIGTDNNNSSDSVNMIGDMKFMAHIHRAVHRDADVLTPEKILEMATIDGARSLGMDHEIGSIETGKRADLILLDLRHPQTTPHHHLAATIVFQAYGNEVDTVLIDGNVVMENRRLSFLPPERELAFLEEAQSRATAILQRANMVANPAWRSL

SEQ ID NO: 537 - protein, 473 aa, Artificial Sequence
  Description of Artificial Sequence: Synthetic peptide
MQTLSIQHGTLVTMDQYRRVLGDSWVHVQDGRIVALGVHAESVPPPADRVIDARGKVVLPGFINAHTHVNQILLRGGPSHGRQLYDWLFNVVYPGQKAMRPEVAVAVRLYCAEAVRSGITTINEDADSAIYPGNIEAAMAVYGEVGVRVVYARMFFDRMDGRIQGYVDALKARSPQVELCSIMEETAVAKDRITALSDQYHGTAGGRISVWPAPATTTTVTVEGMRWAQAFARDRAVMWTLHMAESDHDERILGGSPAEYMECYGLLDERLQVAHCVYFDRKDVRLLHRHNVKVASQVVSNAYLGSGVAPVPEMVERGMAVGIGTDNDNSCDSVNMIGDMKFMAHIHRAVHRDADVLTPEKILEMATIDGARSLGMDHEIGSIETGKRADLILLDLRHPQTTPHHHLAATIVFQAYGNEVDTVLIDGNVVMENRRLSFLPPERELAFLEEAQSRATAILQRANMVANPAWRSL

SEQ ID NO: 538 - protein, 473 aa, Artificial Sequence
  Description of Artificial Sequence: Synthetic peptide
MQTLSIQHGTLVTMDQYRRVLGDSWVHVQDGRIVALGVHAESVPPPADRVIDARGKVVLPGFINAHTHVNQILLRGGPSHGRQLYDWLFNVVYPGQKAMRPEVAVAVRLYCAEAVRSGITTINEDADSAIYPGNIEAAMAVYGEVGVRVVYARMFFDRMDGRIQGYVDALKARSPQVELCSIMEETAVAKDRITALSDQYHGTAGGRISVWPAPATTTTVTVEGMRWAQAFARDRAVMWTLHMAESDHDERILGGSPAEYMECYGLLDERLQVAHCVYFDRKDVRLLHRHNVKVASQVVSNAYLGSGVAPVPEMVERGMAVGIGTDNDNSSDSVNMIGDMKFMAHIHRAVHRDADVLTPEKILEMATIDGARSLGMDHEIGSIETGKRADLILLDLRHPQTTPHHHLAATIVFQAYGNEVDTVLIDGNVVMENRRLSFLPPERELAFLEEAQSRATAILQRANMVANPAWRSL

SEQ ID NO: 539 - protein, 473 aa, Artificial Sequence
  Description of Artificial Sequence: Synthetic peptide
MQTLSIQHGTLVTMDQYRRVLGDSWVHVQDGRIVALGVHAESVPPPADRVIDARGKVVLPGFINAHTHVNQILLRGGPSHGRQLYDWLFNVVYPGQKAMRPEVAVAVRLYCAEAVRSGITTINEDADSAIYPGNIEAAMAVYGEVGVRVVYARMFFDRMDGRIQGYVDALKARSPQVELCSIMEETAVAKDRITALSDQYHGTAGGRISVWPAPATTTTVTVEGMRWAQAFARDRAVMWTLHMAESDHDERILGGSPAEYMECYGLLDERLQVAHCVYFDRKDVRLLHRHNVKVASQVVSNAYLGSGVAPVPEMVERGMAVGIGTDNNNSCDSVNMIGDMKFMAHIHRAVHRDADVLTPEKILEMATIDGARSLGMDHEIGSIETGKRADLILLDLRHPQTTPHHHLAATIVFQAYGNEVDTVLIDGNVVMENRRLSFLPPERELAFLEEAQSRATAILQRANMVANPAWRSL

SEQ ID NO: 540 - protein, 473 aa, Artificial Sequence
  Description of Artificial Sequence: Synthetic peptide
MQTLSIQHGTLVTMDQYRRVLGDSWVHVQDGRIVALGVHAESVPPPADRVIDARGKVVLPGFINAHTHVNQILLRGGPSHGRQLYDWLFNVVYPGQKAMRPEVAVAVRLYCAEAVRSGITTINEDADSAIYPGNIEAAMAVYGEVGVRVVYARMFFDRMDGRIQGYVDALKARSPQVELCSIMEETAVAKDRITALSDQYHGTAGGRISVWPAPATTTTVTVEGMRWAQAFARDRAVMWTLHMAESDHDERILGGSPAEYMECYGLLDERLQVAHCVYFDRKDVRLLHRHNVKVASQVVSNAYLGSGVAPVPEMVERGMAVGIGTDNNNSSDSVNMIGDMKFMAHIHRAVHRDADVLTPEKILEMATIDGARSLGMDHEIGSIETGKRADLILLDLRHPQTTPHHHLAATIVFQAYGNEVDTVLIDGNVVMENRRLSFLPPERELAFLEEAQSRATAILQRANMVANPAWRSL

SEQ ID NO: 541 - protein, 473 aa, Artificial Sequence
  Description of Artificial Sequence: Synthetic peptide
MQTLSIQHGTLVTMDQYRRVLGDSWVHVQDGRIVALGVHAESVPPPADRVIDARGKVVLPGFINAHTHVNQILLRGGPSHGRQLYDWLFNVVYPGQKAMRPEVAVAVRLYCAEAVRSGITTINEDADSAIYPGNIEAAMAVYGEVGVRVVYARMFFDRMDGRIQGYVDALKARSPQVELCSIMEETAVAKDRITALSDQYHGTAGGRISVWPAPATTTTVTVEGMRWAQAFARDRAVMWTLHMAESDHDERILGWSPAEYMECYGLLDERLQVAHCVYFDRKDVRLLHRHNVKVASQVVSNAYLGSGVAPVPEMVERGMAVGIGTDNDNSCDSVNMIGDMKFMAHIHRAVHRDADVLTPEKILEMATIDGARSLGMDHEIGSIETGKRADLILLDLRHPQTTPHHHLAATIVFQAYGNEVDTVLIDGNVVMENRRLSFLPPERELAFLEEAQSRATAILQRANMVANPAWRSL

SEQ ID NO: 542 - protein, 473 aa, Artificial Sequence
  Description of Artificial Sequence: Synthetic peptide
MQTLSIQHGTLVTMDQYRRVLGDSWVHVQDGRIVALGVHAESVPPPADRVIDARGKVVLPGFINAHTHVNQILLRGGPSHGRQLYDWLFNVVYPGQKAMRPEVAVAVRLYCAEAVRSGITTINEDADSAIYPGNIEAAMAVYGEVGVRVVYARMFFDRMDGRIQGYVDALKARSPQVELCSIMEETAVAKDRITALSDQYHGTAGGRISVWPAPATTTTVTVEGMRWAQAFARDRAVMWTLHMAESDHDERILGWSPAEYMECYGLLDERLQVAHCVYFDRKDVRLLHRHNVKVASQVVSNAYLGSGVAPVPEMVERGMAVGIGTDNDNSSDSVNMIGDMKFMAHIHRAVHRDADVLTPEKILEMATIDGARSLGMDHEIGSIETGKRADLILLDLRHPQTTPHHHLAATIVFQAYGNEVDTVLIDGNVVMENRRLSFLPPERELAFLEEAQSRATAILQRANMVANPAWRSL

SEQ ID NO: 543 - protein, 473 aa, Artificial Sequence
  Description of Artificial Sequence: Synthetic peptide
MQTLSIQHGTLVTMDQYRRVLGDSWVHVQDGRIVALGVHAESVPPPADRVIDARGKVVLPGFINAHTHVNQILLRGGPSHGRQLYDWLFNVVYPGQKAMRPEVAVAVRLYCAEAVRSGITTINEDADSAIYPGNIEAAMAVYGEVGVRVVYARMFFDRMDGRIQGYVDALKARSPQVELCSIMEETAVAKDRITALSDQYHGTAGGRISVWPAPATTTTVTVEGMRWAQAFARDRAVMWTLHMAESDHDERILGWSPAEYMECYGLLDERLQVAHCVYFDRKDVRLLHRHNVKVASQVVSNAYLGSGVAPVPEMVERGMAVGIGTDNNNSCDSVNMIGDMKFMAHIHRAVHRDADVLTPEKILEMATIDGARSLGMDHEIGSIETGKRADLILLDLRHPQTTPHHHLAATIVFQAYGNEVDTVLIDGNVVMENRRLSFLPPERELAFLEEAQSRATAILQRANMVANPAWRSL

SEQ ID NO: 544 - protein, 473 aa, Artificial Sequence
  Description of Artificial Sequence: Synthetic peptide
MQTLSIQHGTLVTMDQYRRVLGDSWVHVQDGRIVALGVHAESVPPPADRVIDARGKVVLPGFINAHTHVNQILLRGGPSHGRQLYDWLFNVVYPGQKAMRPEVAVAVRLYCAEAVRSGITTINEDADSAIYPGNIEAAMAVYGEVGVRVVYARMFFDRMDGRIQGYVDALKARSPQVELCSIMEETAVAKDRITALSDQYHGTAGGRISVWPAPATTTTVTVEGMRWAQAFARDRAVMWTLHMAESDHDERILGWSPAEYMECYGLLDERLQVAHCVYFDRKDVRLLHRHNVKVASQVVSNAYLGSGVAPVPEMVERGMAVGIGTDNNNSSDSVNMIGDMKFMAHIHRAVHRDADVLTPEKILEMATIDGARSLGMDHEIGSIETGKRADLILLDLRHPQTTPHHHLAATIVFQAYGNEVDTVLIDGNVVMENRRLSFLPPERELAFLEEAQSRATAILQRANMVANPAWRSL

SEQ ID NO: 545 - protein, 473 aa, Artificial Sequence
  Description of Artificial Sequence: Synthetic peptide
MQTLSIQHGTLVTMDQYRRVLGDSWVHVQDGRIVALGVHAESVPPPADRVIDARGKVVLPGFINAHTHVNQILLRGGPSHGRQLYDWLFNVVYPGQKAMRPEVAVAVRLYCAEAVRSGITTINEEADSAIYPGNIEAAMAVYGEVGVRVVYARMFFDRMDGRIQGYVDALKARSPQVELCSIMEETAVAKDRITALSDQYHGTAGGRISVWPAPATITPVTVEGMRWAQAFARDRAVMWTLHMAESDHDERIIGGSPAEYMECYGLLDERLQVAHCVYFDRKDVRLLHRHNVKVASQVVSNAYLGSGVAPVPEMVERGMAVGIGTDNDNSCDSVNMIGDMKFMAHIHRAVHRDADVLTPEKILEMATIDGARSLGMDHEIGSIETGKRADLILLDLRHPQTTPHHHLAATIVFQAYGNEVDTVLIDGNVVMENRRLSFLPPERELAFLEEAQSRATAILQRANMVANPAWRSL

SEQ ID NO: 546 - protein, 473 aa, Artificial Sequence
  Description of Artificial Sequence: Synthetic peptide
MQTLSIQHGTLVTMDQYRRVLGDSWVHVQDGRIVALGVHAESVPPPADRVIDARGKVVLPGFINAHTHVNQILLRGGPSHGRQLYDWLFNVVYPGQKAMRPEVAVAVRLYCAEAVRSGITTINEEADSAIYPGNIEAAMAVYGEVGVRVVYARMFFDRMDGRIQGYVDALKARSPQVELCSIMEETAVAKDRITALSDQYHGTAGGRISVWPAPATITPVTVEGMRWAQAFARDRAVMWTLHMAESDHDERIIGGSPAEYMECYGLLDERLQVAHCVYFDRKDVRLLHRHNVKVASQVVSNAYLGSGVAPVPEMVERGMAVGIGTDNDNSSDSVNMIGDMKFMAHIHRAVHRDADVLTPEKILEMATIDGARSLGMDHEIGSIETGKRADLILLDLRHPQTTPHHHLAATIVFQAYGNEVDTVLIDGNVVMENRRLSFLPPERELAFLEEAQSRATAILQRANMVANPAWRSL

SEQ ID NO: 547 - protein, 473 aa, Artificial Sequence
  Description of Artificial Sequence: Synthetic peptide
MQTLSIQHGTLVTMDQYRRVLGDSWVHVQDGRIVALGVHAESVPPPADRVIDARGKVVLPGFINAHTHVNQILLRGGPSHGRQLYDWLFNVVYPGQKAMRPEVAVAVRLYCAEAVRSGITTINEEADSAIYPGNIEAAMAVYGEVGVRVVYARMFFDRMDGRIQGYVDALKARSPQVELCSIMEETAVAKDRITALSDQYHGTAGGRISVWPAPATITPVTVEGMRWAQAFARDRAVMWTLHMAESDHDERIIGGSPAEYMECYGLLDERLQVAHCVYFDRKDVRLLHRHNVKVASQVVSNAYLGSGVAPVPEMVERGMAVGIGTDNNNSCDSVNMIGDMKFMAHIHRAVHRDADVLTPEKILEMATIDGARSLGMDHEIGSIETGKRADLILLDLRHPQTTPHHHLAATIVFQAYGNEVDTVLIDGNVVMENRRLSFLPPERELAFLEEAQSRATAILQRANMVANPAWRSL

SEQ ID NO: 548 - protein, 473 aa, Artificial Sequence
  Description of Artificial Sequence: Synthetic peptide
MQTLSIQHGTLVTMDQYRRVLGDSWVHVQDGRIVALGVHAESVPPPADRVIDARGKVVLPGFINAHTHVNQILLRGGPSHGRQLYDWLFNVVYPGQKAMRPEVAVAVRLYCAEAVRSGITTINEEADSAIYPGNIEAAMAVYGEVGVRVVYARMFFDRMDGRIQGYVDALKARSPQVELCSIMEETAVAKDRITALSDQYHGTAGGRISVWPAPATITPVTVEGMRWAQAFARDRAVMWTLHMAESDHDERIIGGSPAEYMECYGLLDERLQVAHCVYFDRKDVRLLHRHNVKVASQVVSNAYLGSGVAPVPEMVERGMAVGIGTDNNNSSDSVNMIGDMKFMAHIHRAVHRDADVLTPEKILEMATIDGARSLGMDHEIGSIETGKRADLILLDLRHPQTTPHHHLAATIVFQAYGNEVDTVLIDGNVVMENRRLSFLPPERELAFLEEAQSRATAILQRANMVANPAWRSL

SEQ ID NO: 549 - protein, 473 aa, Artificial Sequence
  Description of Artificial Sequence: Synthetic peptide
MQTLSIQHGTLVTMDQYRRVLGDSWVHVQDGRIVALGVHAESVPPPADRVIDARGKVVLPGFINAHTHVNQILLRGGPSHGRQLYDWLFNVVYPGQKAMRPEVAVAVRLYCAEAVRSGITTINEEADSAIYPGNIEAAMAVYGEVGVRVVYARMFFDRMDGRIQGYVDALKARSPQVELCSIMEETAVAKDRITALSDQYHGTAGGRISVWPAPATITPVTVEGMRWAQAFARDRAVMWTLHMAESDHDERIIGWSPAEYMECYGLLDERLQVAHCVYFDRKDVRLLHRHNVKVASQVVSNAYLGSGVAPVPEMVERGMAVGIGTDNDNSCDSVNMIGDMKFMAHIHRAVHRDADVLTPEKILEMATIDGARSLGMDHEIGSIETGKRADLILLDLRHPQTTPHHHLAATIVFQAYGNEVDTVLIDGNVVMENRRLSFLPPERELAFLEEAQSRATAILQRANMVANPAWRSL

SEQ ID NO: 550 - protein, 473 aa, Artificial Sequence
  Description of Artificial Sequence: Synthetic peptide
MQTLSIQHGTLVTMDQYRRVLGDSWVHVQDGRIVALGVHAESVPPPADRVIDARGKVVLPGFINAHTHVNQILLRGGPSHGRQLYDWLFNVVYPGQKAMRPEVAVAVRLYCAEAVRSGITTINEEADSAIYPGNIEAAMAVYGEVGVRVVYARMFFDRMDGRIQGYVDALKARSPQVELCSIMEETAVAKDRITALSDQYHGTAGGRISVWPAPATITPVTVEGMRWAQAFARDRAVMWTLHMAESDHDERIIGWSPAEYMECYGLLDERLQVAHCVYFDRKDVRLLHRHNVKVASQVVSNAYLGSGVAPVPEMVERGMAVGIGTDNDNSSDSVNMIGDMKFMAHIHRAVHRDADVLTPEKILEMATIDGARSLGMDHEIGSIETGKRADLILLDLRHPQTTPHHHLAATIVFQAYGNEVDTVLIDGNVVMENRRLSFLPPERELAFLEEAQSRATAILQRANMVANPAWRSL

SEQ ID NO: 551 - protein, 473 aa, Artificial Sequence
  Description of Artificial Sequence: Synthetic peptide
MQTLSIQHGTLVTMDQYRRVLGDSWVHVQDGRIVALGVHAESVPPPADRVIDARGKVVLPGFINAHTHVNQILLRGGPSHGRQLYDWLFNVVYPGQKAMRPEVAVAVRLYCAEAVRSGITTINEEADSAIYPGNIEAAMAVYGEVGVRVVYARMFFDRMDGRIQGYVDALKARSPQVELCSIMEETAVAKDRITALSDQYHGTAGGRISVWPAPATITPVTVEGMRWAQAFARDRAVMWTLHMAESDHDERIIGWSPAEYMECYGLLDERLQVAHCVYFDRKDVRLLHRHNVKVASQVVSNAYLGSGVAPVPEMVERGMAVGIGTDNNNSCDSVNMIGDMKFMAHIHRAVHRDADVLTPEKILEMATIDGARSLGMDHEIGSIETGKRADLILLDLRHPQTTPHHHLAATIVFQAYGNEVDTVLIDGNVVMENRRLSFLPPERELAFLEEAQSRATAILQRANMVANPAWRSL

SEQ ID NO: 552 - protein, 473 aa, Artificial Sequence
  Description of Artificial Sequence: Synthetic peptide
MQTLSIQHGTLVTMDQYRRVLGDSWVHVQDGRIVALGVHAESVPPPADRVIDARGKVVLPGFINAHTHVNQILLRGGPSHGRQLYDWLFNVVYPGQKAMRPEVAVAVRLYCAEAVRSGITTINEEADSAIYPGNIEAAMAVYGEVGVRVVYARMFFDRMDGRIQGYVDALKARSPQVELCSIMEETAVAKDRITALSDQYHGTAGGRISVWPAPATITPVTVEGMRWAQAFARDRAVMWTLHMAESDHDERIIGWSPAEYMECYGLLDERLQVAHCVYFDRKDVRLLHRHNVKVASQVVSNAYLGSGVAPVPEMVERGMAVGIGTDNNNSSDSVNMIGDMKFMAHIHRAVHRDADVLTPEKILEMATIDGARSLGMDHEIGSIETGKRADLILLDLRHPQTTPHHHLAATIVFQAYGNEVDTVLIDGNVVMENRRLSFLPPERELAFLEEAQSRATAILQRANMVANPAWRSL

SEQ ID NO: 553 - protein, 473 aa, Artificial Sequence
  Description of Artificial Sequence: Synthetic peptide
MQTLSIQHGTLVTMDQYRRVLGDSWVHVQDGRIVALGVHAESVPPPADRVIDARGKVVLPGFINAHTHVNQILLRGGPSHGRQLYDWLFNVVYPGQKAMRPEVAVAVRLYCAEAVRSGITTINEEADSAIYPGNIEAAMAVYGEVGVRVVYARMFFDRMDGRIQGYVDALKARSPQVELCSIMEETAVAKDRITALSDQYHGTAGGRISVWPAPATITPVTVEGMRWAQAFARDRAVMWTLHMAESDHDERILGGSPAEYMECYGLLDERLQVAHCVYFDRKDVRLLHRHNVKVASQVVSNAYLGSGVAPVPEMVERGMAVGIGTDNDNSCDSVNMIGDMKFMAHIHRAVHRDADVLTPEKILEMATIDGARSLGMDHEIGSIETGKRADLILLDLRHPQTTPHHHLAATIVFQAYGNEVDTVLIDGNVVMENRRLSFLPPERELAFLEEAQSRATAILQRANMVANPAWRSL

SEQ ID NO: 554 - protein, 473 aa, Artificial Sequence
  Description of Artificial Sequence: Synthetic peptide
MQTLSIQHGTLVTMDQYRRVLGDSWVHVQDGRIVALGVHAESVPPPADRVIDARGKVVLPGFINAHTHVNQILLRGGPSHGRQLYDWLFNVVYPGQKAMRPEVAVAVRLYCAEAVRSGITTINEEADSAIYPGNIEAAMAVYGEVGVRVVYARMFFDRMDGRIQGYVDALKARSPQVELCSIMEETAVAKDRITALSDQYHGTAGGRISVWPAPATITPVTVEGMRWAQAFARDRAVMWTLHMAESDHDERILGGSPAEYMECYGLLDERLQVAHCVYFDRKDVRLLHRHNVKVASQVVSNAYLGSGVAPVPEMVERGMAVGIGTDNDNSSDSVNMIGDMKFMAHIHRAVHRDADVLTPEKILEMATIDGARSLGMDHEIGSIETGKRADLILLDLRHPQTTPHHHLAATIVFQAYGNEVDTVLIDGNVVMENRRLSFLPPERELAFLEEAQSRATAILQRANMVANPAWRSL

SEQ ID NO: 555 - protein, 473 aa, Artificial Sequence
  Description of Artificial Sequence: Synthetic peptide
MQTLSIQHGTLVTMDQYRRVLGDSWVHVQDGRIVALGVHAESVPPPADRVIDARGKVVLPGFINAHTHVNQILLRGGPSHGRQLYDWLFNVVYPGQKAMRPEVAVAVRLYCAEAVRSGITTINEEADSAIYPGNIEAAMAVYGEVGVRVVYARMFFDRMDGRIQGYVDALKARSPQVELCSIMEETAVAKDRITALSDQYHGTAGGRISVWPAPATITPVTVEGMRWAQAFARDRAVMWTLHMAESDHDERILGGSPAEYMECYGLLDERLQVAHCVYFDRKDVRLLHRHNVKVASQVVSNAYLGSGVAPVPEMVERGMAVGIGTDNNNSCDSVNMIGDMKFMAHIHRAVHRDADVLTPEKILEMATIDGARSLGMDHEIGSIETGKRADLILLDLRHPQTTPHHHLAATIVFQAYGNEVDTVLIDGNVVMENRRLSFLPPERELAFLEEAQSRATAILQRANMVANPAWRSL

SEQ ID NO: 556 - protein, 473 aa, Artificial Sequence
  Description of Artificial Sequence: Synthetic peptide
MQTLSIQHGTLVTMDQYRRVLGDSWVHVQDGRIVALGVHAESVPPPADRVIDARGKVVLPGFINAHTHVNQILLRGGPSHGRQLYDWLFNVVYPGQKAMRPEVAVAVRLYCAEAVRSGITTINEEADSAIYPGNIEAAMAVYGEVGVRVVYARMFFDRMDGRIQGYVDALKARSPQVELCSIMEETAVAKDRITALSDQYHGTAGGRISVWPAPATITPVTVEGMRWAQAFARDRAVMWTLHMAESDHDERILGGSPAEYMECYGLLDERLQVAHCVYFDRKDVRLLHRHNVKVASQVVSNAYLGSGVAPVPEMVERGMAVGIGTDNNNSSDSVNMIGDMKFMAHIHRAVHRDADVLTPEKILEMATIDGARSLGMDHEIGSIETGKRADLILLDLRHPQTTPHHHLAATIVFQAYGNEVDTVLIDGNVVMENRRLSFLPPERELAFLEEAQSRATAILQRANMVANPAWRSL

SEQ ID NO: 557 - protein, 473 aa, Artificial Sequence
  Description of Artificial Sequence: Synthetic peptide
MQTLSIQHGTLVTMDQYRRVLGDSWVHVQDGRIVALGVHAESVPPPADRVIDARGKVVLPGFINAHTHVNQILLRGGPSHGRQLYDWLFNVVYPGQKAMRPEVAVAVRLYCAEAVRSGITTINEEADSAIYPGNIEAAMAVYGEVGVRVVYARMFFDRMDGRIQGYVDALKARSPQVELCSIMEETAVAKDRITALSDQYHGTAGGRISVWPAPATITPVTVEGMRWAQAFARDRAVMWTLHMAESDHDERILGWSPAEYMECYGLLDERLQVAHCVYFDRKDVRLLHRHNVKVASQVVSNAYLGSGVAPVPEMVERGMAVGIGTDNDNSCDSVNMIGDMKFMAHIHRAVHRDADVLTPEKILEMATIDGARSLGMDHEIGSIETGKRADLILLDLRHPQTTPHHHLAATIVFQAYGNEVDTVLIDGNVVMENRRLSFLPPERELAFLEEAQSRATAILQRANMVANPAWRSL

SEQ ID NO: 558 - protein, 473 aa, Artificial Sequence
  Description of Artificial Sequence: Synthetic peptide
MQTLSIQHGTLVTMDQYRRVLGDSWVHVQDGRIVALGVHAESVPPPADRVIDARGKVVLPGFINAHTHVNQILLRGGPSHGRQLYDWLFNVVYPGQKAMRPEVAVAVRLYCAEAVRSGITTINEEADSAIYPGNIEAAMAVYGEVGVRVVYARMFFDRMDGRIQGYVDALKARSPQVELCSIMEETAVAKDRITALSDQYHGTAGGRISVWPAPATITPVTVEGMRWAQAFARDRAVMWTLHMAESDHDERILGWSPAEYMECYGLLDERLQVAHCVYFDRKDVRLLHRHNVKVASQVVSNAYLGSGVAPVPEMVERGMAVGIGTDNDNSSDSVNMIGDMKFMAHIHRAVHRDADVLTPEKILEMATIDGARSLGMDHEIGSIETGKRADLILLDLRHPQTTPHHHLAATIVFQAYGNEVDTVLIDGNVVMENRRLSFLPPERELAFLEEAQSRATAILQRANMVANPAWRSL

SEQ ID NO: 559 - protein, 473 aa, Artificial Sequence
  Description of Artificial Sequence: Synthetic peptide
MQTLSIQHGTLVTMDQYRRVLGDSWVHVQDGRIVALGVHAESVPPPADRVIDARGKVVLPGFINAHTHVNQILLRGGPSHGRQLYDWLFNVVYPGQKAMRPEVAVAVRLYCAEAVRSGITTINEEADSAIYPGNIEAAMAVYGEVGVRVVYARMFFDRMDGRIQGYVDALKARSPQVELCSIMEETAVAKDRITALSDQYHGTAGGRISVWPAPATITPVTVEGMRWAQAFARDRAVMWTLHMAESDHDERILGWSPAEYMECYGLLDERLQVAHCVYFDRKDVRLLHRHNVKVASQVVSNAYLGSGVAPVPEMVERGMAVGIGTDNNNSCDSVNMIGDMKFMAHIHRAVHRDADVLTPEKILEMATIDGARSLGMDHEIGSIETGKRADLILLDLRHPQTTPHHHLAATIVFQAYGNEVDTVLIDGNVVMENRRLSFLPPERELAFLEEAQSRATAILQRANMVANPAWRSL

SEQ ID NO: 560 - protein, 473 aa, Artificial Sequence
  Description of Artificial Sequence: Synthetic peptide
MQTLSIQHGTLVTMDQYRRVLGDSWVHVQDGRIVALGVHAESVPPPADRVIDARGKVVLPGFINAHTHVNQILLRGGPSHGRQLYDWLFNVVYPGQKAMRPEVAVAVRLYCAEAVRSGITTINEEADSAIYPGNIEAAMAVYGEVGVRVVYARMFFDRMDGRIQGYVDALKARSPQVELCSIMEETAVAKDRITALSDQYHGTAGGRISVWPAPATITPVTVEGMRWAQAFARDRAVMWTLHMAESDHDERILGWSPAEYMECYGLLDERLQVAHCVYFDRKDVRLLHRHNVKVASQVVSNAYLGSGVAPVPEMVERGMAVGIGTDNNNSSDSVNMIGDMKFMAHIHRAVHRDADVLTPEKILEMATIDGARSLGMDHEIGSIETGKRADLILLDLRHPQTTPHHHLAATIVFQAYGNEVDTVLIDGNVVMENRRLSFLPPERELAFLEEAQSRATAILQRANMVANPAWRSL

SEQ ID NO: 561 - protein, 473 aa, Artificial Sequence
  Description of Artificial Sequence: Synthetic peptide
MQTLSIQHGTLVTMDQYRRVLGDSWVHVQDGRIVALGVHAESVPPPADRVIDARGKVVLPGFINAHTHVNQILLRGGPSHGRQLYDWLFNVVYPGQKAMRPEVAVAVRLYCAEAVRSGITTINEEADSAIYPGNIEAAMAVYGEVGVRVVYARMFFDRMDGRIQGYVDALKARSPQVELCSIMEETAVAKDRITALSDQYHGTAGGRISVWPAPATITTVTVEGMRWAQAFARDRAVMWTLHMAESDHDERIIGGSPAEYMECYGLLDERLQVAHCVYFDRKDVRLLHRHNVKVASQVVSNAYLGSGVAPVPEMVERGMAVGIGTDNDNSCDSVNMIGDMKFMAHIHRAVHRDADVLTPEKILEMATIDGARSLGMDHEIGSIETGKRADLILLDLRHPQTTPHHHLAATIVFQAYGNEVDTVLIDGNVVMENRRLSFLPPERELAFLEEAQSRATAILQRANMVANPAWRSL

SEQ ID NO: 562 - protein, 473 aa, Artificial Sequence
  Description of Artificial Sequence: Synthetic peptide
MQTLSIQHGTLVTMDQYRRVLGDSWVHVQDGRIVALGVHAESVPPPADRVIDARGKVVLPGFINAHTHVNQILLRGGPSHGRQLYDWLFNVVYPGQKAMRPEVAVAVRLYCAEAVRSGITTINEEADSAIYPGNIEAAMAVYGEVGVRVVYARMFFDRMDGRIQGYVDALKARSPQVELCSIMEETAVAKDRITALSDQYHGTAGGRISVWPAPATITTVTVEGMRWAQAFARDRAVMWTLHMAESDHDERIIGGSPAEYMECYGLLDERLQVAHCVYFDRKDVRLLHRHNVKVASQVVSNAYLGSGVAPVPEMVERGMAVGIGTDNDNSSDSVNMIGDMKFMAHIHRAVHRDADVLTPEKILEMATIDGARSLGMDHEIGSIETGKRADLILLDLRHPQTTPHHHLAATIVFQAYGNEVDTVLIDGNVVMENRRLSFLPPERELAFLEEAQSRATAILQRANMVANPAWRSL

SEQ ID NO: 563 - protein, 473 aa, Artificial Sequence
  Description of Artificial Sequence: Synthetic peptide
MQTLSIQHGTLVTMDQYRRVLGDSWVHVQDGRIVALGVHAESVPPPADRVIDARGKVVLPGFINAHTHVNQILLRGGPSHGRQLYDWLFNVVYPGQKAMRPEVAVAVRLYCAEAVRSGITTINEEADSAIYPGNIEAAMAVYGEVGVRVVYARMFFDRMDGRIQGYVDALKARSPQVELCSIMEETAVAKDRITALSDQYHGTAGGRISVWPAPATITTVTVEGMRWAQAFARDRAVMWTLHMAESDHDERIIGGSPAEYMECYGLLDERLQVAHCVYFDRKDVRLLHRHNVKVASQVVSNAYLGSGVAPVPEMVERGMAVGIGTDNNNSCDSVNMIGDMKFMAHIHRAVHRDADVLTPEKILEMATIDGARSLGMDHEIGSIETGKRADLILLDLRHPQTTPHHHLAATIVFQAYGNEVDTVLIDGNVVMENRRLSFLPPERELAFLEEAQSRATAILQRANMVANPAWRSL

SEQ ID NO: 564 - protein, 473 aa, Artificial Sequence
  Description of Artificial Sequence: Synthetic peptide
MQTLSIQHGTLVTMDQYRRVLGDSWVHVQDGRIVALGVHAESVPPPADRVIDARGKVVLPGFINAHTHVNQILLRGGPSHGRQLYDWLFNVVYPGQKAMRPEVAVAVRLYCAEAVRSGITTINEEADSAIYPGNIEAAMAVYGEVGVRVVYARMFFDRMDGRIQGYVDALKARSPQVELCSIMEETAVAKDRITALSDQYHGTAGGRISVWPAPATITTVTVEGMRWAQAFARDRAVMWTLHMAESDHDERIIGGSPAEYMECYGLLDERLQVAHCVYFDRKDVRLLHRHNVKVASQVVSNAYLGSGVAPVPEMVERGMAVGIGTDNNNSSDSVNMIGDMKFMAHIHRAVHRDADVLTPEKILEMATIDGARSLGMDHEIGSIETGKRADLILLDLRHPQTTPHHHLAATIVFQAYGNEVDTVLIDGNVVMENRRLSFLPPERELAFLEEAQSRATAILQRANMVANPAWRSL

SEQ ID NO: 565 - protein, 473 aa, Artificial Sequence
  Description of Artificial Sequence: Synthetic peptide
MQTLSIQHGTLVTMDQYRRVLGDSWVHVQDGRIVALGVHAESVPPPADRVIDARGKVVLPGFINAHTHVNQILLRGGPSHGRQLYDWLFNVVYPGQKAMRPEVAVAVRLYCAEAVRSGITTINEEADSAIYPGNIEAAMAVYGEVGVRVVYARMFFDRMDGRIQGYVDALKARSPQVELCSIMEETAVAKDRITALSDQYHGTAGGRISVWPAPATITTVTVEGMRWAQAFARDRAVMWTLHMAESDHDERIIGWSPAEYMECYGLLDERLQVAHCVYFDRKDVRLLHRHNVKVASQVVSNAYLGSGVAPVPEMVERGMAVGIGTDNDNSCDSVNMIGDMKFMAHIHRAVHRDADVLTPEKILEMATIDGARSLGMDHEIGSIETGKRADLILLDLRHPQTTPHHHLAATIVFQAYGNEVDTVLIDGNVVMENRRLSFLPPERELAFLEEAQSRATAILQRANMVANPAWRSL

SEQ ID NO: 566 - protein, 473 aa, Artificial Sequence
  Description of Artificial Sequence: Synthetic peptide
MQTLSIQHGTLVTMDQYRRVLGDSWVHVQDGRIVALGVHAESVPPPADRVIDARGKVVLPGFINAHTHVNQILLRGGPSHGRQLYDWLFNVVYPGQKAMRPEVAVAVRLYCAEAVRSGITTINEEADSAIYPGNIEAAMAVYGEVGVRVVYARMFFDRMDGRIQGYVDALKARSPQVELCSIMEETAVAKDRITALSDQYHGTAGGRISVWPAPATITTVTVEGMRWAQAFARDRAVMWTLHMAESDHDERIIGWSPAEYMECYGLLDERLQVAHCVYFDRKDVRLLHRHNVKVASQVVSNAYLGSGVAPVPEMVERGMAVGIGTDNDNSSDSVNMIGDMKFMAHIHRAVHRDADVLTPEKILEMATIDGARSLGMDHEIGSIETGKRADLILLDLRHPQTTPHHHLAATIVFQAYGNEVDTVLIDGNVVMENRRLSFLPPERELAFLEEAQSRATAILQRANMVANPAWRSL

SEQ ID NO: 567 - protein, 473 aa, Artificial Sequence
  Description of Artificial Sequence: Synthetic peptide
MQTLSIQHGTLVTMDQYRRVLGDSWVHVQDGRIVALGVHAESVPPPADRVIDARGKVVLPGFINAHTHVNQILLRGGPSHGRQLYDWLFNVVYPGQKAMRPEVAVAVRLYCAEAVRSGITTINEEADSAIYPGNIEAAMAVYGEVGVRVVYARMFFDRMDGRIQGYVDALKARSPQVELCSIMEETAVAKDRITALSDQYHGTAGGRISVWPAPATITTVTVEGMRWAQAFARDRAVMWTLHMAESDHDERIIGWSPAEYMECYGLLDERLQVAHCVYFDRKDVRLLHRHNVKVASQVVSNAYLGSGVAPVPEMVERGMAVGIGTDNNNSCDSVNMIGDMKFMAHIHRAVHRDADVLTPEKILEMATIDGARSLGMDHEIGSIETGKRADLILLDLRHPQTTPHHHLAATIVFQAYGNEVDTVLIDGNVVMENRRLSFLPPERELAFLEEAQSRATAILQRANMVANPAWRSL

SEQ ID NO: 568 - protein, 473 aa, Artificial Sequence
  Description of Artificial Sequence: Synthetic peptide
MQTLSIQHGTLVTMDQYRRVLGDSWVHVQDGRIVALGVHAESVPPPADRVIDARGKVVLPGFINAHTHVNQILLRGGPSHGRQLYDWLFNVVYPGQKAMRPEVAVAVRLYCAEAVRSGITTINEEADSAIYPGNIEAAMAVYGEVGVRVVYARMFFDRMDGRIQGYVDALKARSPQVELCSIMEETAVAKDRITALSDQYHGTAGGRISVWPAPATITTVTVEGMRWAQAFARDRAVMWTLHMAESDHDERIIGWSPAEYMECYGLLDERLQVAHCVYFDRKDVRLLHRHNVKVASQVVSNAYLGSGVAPVPEMVERGMAVGIGTDNNNSSDSVNMIGDMKFMAHIHRAVHRDADVLTPEKILEMATIDGARSLGMDHEIGSIETGKRADLILLDLRHPQTTPHHHLAATIVFQAYGNEVDTVLIDGNVVMENRRLSFLPPERELAFLEEAQSRATAILQRANMVANPAWRSL

SEQ ID NO: 569 - protein, 473 aa, Artificial Sequence
  Description of Artificial Sequence: Synthetic peptide
MQTLSIQHGTLVTMDQYRRVLGDSWVHVQDGRIVALGVHAESVPPPADRVIDARGKVVLPGFINAHTHVNQILLRGGPSHGRQLYDWLFNVVYPGQKAMRPEVAVAVRLYCAEAVRSGITTINEEADSAIYPGNIEAAMAVYGEVGVRVVYARMFFDRMDGRIQGYVDALKARSPQVELCSIMEETAVAKDRITALSDQYHGTAGGRISVWPAPATITTVTVEGMRWAQAFARDRAVMWTLHMAESDHDERILGGSPAEYMECYGLLDERLQVAHCVYFDRKDVRLLHRHNVKVASQVVSNAYLGSGVAPVPEMVERGMAVGIGTDNDNSCDSVNMIGDMKFMAHIHRAVHRDADVLTPEKILEMATIDGARSLGMDHEIGSIETGKRADLILLDLRHPQTTPHHHLAATIVFQAYGNEVDTVLIDGNVVMENRRLSFLPPERELAFLEEAQSRATAILQRANMVANPAWRSL

SEQ ID NO: 570 - protein, 473 aa, Artificial Sequence
  Description of Artificial Sequence: Synthetic peptide
MQTLSIQHGTLVTMDQYRRVLGDSWVHVQDGRIVALGVHAESVPPPADRVIDARGKVVLPGFINAHTHVNQILLRGGPSHGRQLYDWLFNVVYPGQKAMRPEVAVAVRLYCAEAVRSGITTINEEADSAIYPGNIEAAMAVYGEVGVRVVYARMFFDRMDGRIQGYVDALKARSPQVELCSIMEETAVAKDRITALSDQYHGTAGGRISVWPAPATITTVTVEGMRWAQAFARDRAVMWTLHMAESDHDERILGGSPAEYMECYGLLDERLQVAHCVYFDRKDVRLLHRHNVKVASQVVSNAYLGSGVAPVPEMVERGMAVGIGTDNDNSSDSVNMIGDMKFMAHIHRAVHRDADVLTPEKILEMATIDGARSLGMDHEIGSIETGKRADLILLDLRHPQTTPHHHLAATIVFQAYGNEVDTVLIDGNVVMENRRLSFLPPERELAFLEEAQSRATAILQRANMVANPAWRSL

SEQ ID NO: 571 - protein, 473 aa, Artificial Sequence
  Description of Artificial Sequence: Synthetic peptide
MQTLSIQHGTLVTMDQYRRVLGDSWVHVQDGRIVALGVHAESVPPPADRVIDARGKVVLPGFINAHTHVNQILLRGGPSHGRQLYDWLFNVVYPGQKAMRPEVAVAVRLYCAEAVRSGITTINEEADSAIYPGNIEAAMAVYGEVGVRVVYARMFFDRMDGRIQGYVDALKARSPQVELCSIMEETAVAKDRITALSDQYHGTAGGRISVWPAPATITTVTVEGMRWAQAFARDRAVMWTLHMAESDHDERILGGSPAEYMECYGLLDERLQVAHCVYFDRKDVRLLHRHNVKVASQVVSNAYLGSGVAPVPEMVERGMAVGIGTDNNNSCDSVNMIGDMKFMAHIHRAVHRDADVLTPEKILEMATIDGARSLGMDHEIGSIETGKRADLILLDLRHPQTTPHHHLAATIVFQAYGNEVDTVLIDGNVVMENRRLSFLPPERELAFLEEAQSRATAILQRANMVANPAWRSL

SEQ ID NO: 572 - protein, 473 aa, Artificial Sequence
  Description of Artificial Sequence: Synthetic peptide
MQTLSIQHGTLVTMDQYRRVLGDSWVHVQDGRIVALGVHAESVPPPADRVIDARGKVVLPGFINAHTHVNQILLRGGPSHGRQLYDWLFNVVYPGQKAMRPEVAVAVRLYCAEAVRSGITTINEEADSAIYPGNIEAAMAVYGEVGVRVVYARMFFDRMDGRIQGYVDALKARSPQVELCSIMEETAVAKDRITALSDQYHGTAGGRISVWPAPATITTVTVEGMRWAQAFARDRAVMWTLHMAESDHDERILGGSPAEYMECYGLLDERLQVAHCVYFDRKDVRLLHRHNVKVASQVVSNAYLGSGVAPVPEMVERGMAVGIGTDNNNSSDSVNMIGDMKFMAHIHRAVHRDADVLTPEKILEMATIDGARSLGMDHEIGSIETGKRADLILLDLRHPQTTPHHHLAATIVFQAYGNEVDTVLIDGNVVMENRRLSFLPPERELAFLEEAQSRATAILQRANMVANPAWRSL

SEQ ID NO: 573 - protein, 473 aa, Artificial Sequence
  Description of Artificial Sequence: Synthetic peptide
MQTLSIQHGTLVTMDQYRRVLGDSWVHVQDGRIVALGVHAESVPPPADRVIDARGKVVLPGFINAHTHVNQILLRGGPSHGRQLYDWLFNVVYPGQKAMRPEVAVAVRLYCAEAVRSGITTINEEADSAIYPGNIEAAMAVYGEVGVRVVYARMFFDRMDGRIQGYVDALKARSPQVELCSIMEETAVAKDRITALSDQYHGTAGGRISVWPAPATITTVTVEGMRWAQAFARDRAVMWTLHMAESDHDERILGWSPAEYMECYGLLDERLQVAHCVYFDRKDVRLLHRHNVKVASQVVSNAYLGSGVAPVPEMVERGMAVGIGTDNDNSCDSVNMIGDMKFMAHIHRAVHRDADVLTPEKILEMATIDGARSLGMDHEIGSIETGKRADLILLDLRHPQTTPHHHLAATIVFQAYGNEVDTVLIDGNVVMENRRLSFLPPERELAFLEEAQSRATAILQRANMVANPAWRSL

SEQ ID NO: 574 - protein, 473 aa, Artificial Sequence
  Description of Artificial Sequence: Synthetic peptide
MQTLSIQHGTLVTMDQYRRVLGDSWVHVQDGRIVALGVHAESVPPPADRVIDARGKVVLPGFINAHTHVNQILLRGGPSHGRQLYDWLFNVVYPGQKAMRPEVAVAVRLYCAEAVRSGITTINEEADSAIYPGNIEAAMAVYGEVGVRVVYARMFFDRMDGRIQGYVDALKARSPQVELCSIMEETAVAKDRITALSDQYHGTAGGRISVWPAPATITTVTVEGMRWAQAFARDRAVMWTLHMAESDHDERILGWSPAEYMECYGLLDERLQVAHCVYFDRKDVRLLHRHNVKVASQVVSNAYLGSGVAPVPEMVERGMAVGIGTDNDNSSDSVNMIGDMKFMAHIHRAVHRDADVLTPEKILEMATIDGARSLGMDHEIGSIETGKRADLILLDLRHPQTTPHHHLAATIVFQAYGNEVDTVLIDGNVVMENRRLSFLPPERELAFLEEAQSRATAILQRANMVANPAWRSL

SEQ ID NO: 575 - protein, 473 aa, Artificial Sequence
  Description of Artificial Sequence: Synthetic peptide
MQTLSIQHGTLVTMDQYRRVLGDSWVHVQDGRIVALGVHAESVPPPADRVIDARGKVVLPGFINAHTHVNQILLRGGPSHGRQLYDWLFNVVYPGQKAMRPEVAVAVRLYCAEAVRSGITTINEEADSAIYPGNIEAAMAVYGEVGVRVVYARMFFDRMDGRIQGYVDALKARSPQVELCSIMEETAVAKDRITALSDQYHGTAGGRISVWPAPATITTVTVEGMRWAQAFARDRAVMWTLHMAESDHDERILGWSPAEYMECYGLLDERLQVAHCVYFDRKDVRLLHRHNVKVASQVVSNAYLGSGVAPVPEMVERGMAVGIGTDNNNSCDSVNMIGDMKFMAHIHRAVHRDADVLTPEKILEMATIDGARSLGMDHEIGSIETGKRADLILLDLRHPQTTPHHHLAATIVFQAYGNEVDTVLIDGNVVMENRRLSFLPPERELAFLEEAQSRATAILQRANMVANPAWRSL

SEQ ID NO: 576 - protein, 473 aa, Artificial Sequence
  Description of Artificial Sequence: Synthetic peptide
MQTLSIQHGTLVTMDQYRRVLGDSWVHVQDGRIVALGVHAESVPPPADRVIDARGKVVLPGFINAHTHVNQILLRGGPSHGRQLYDWLFNVVYPGQKAMRPEVAVAVRLYCAEAVRSGITTINEEADSAIYPGNIEAAMAVYGEVGVRVVYARMFFDRMDGRIQGYVDALKARSPQVELCSIMEETAVAKDRITALSDQYHGTAGGRISVWPAPATITTVTVEGMRWAQAFARDRAVMWTLHMAESDHDERILGWSPAEYMECYGLLDERLQVAHCVYFDRKDVRLLHRHNVKVASQVVSNAYLGSGVAPVPEMVERGMAVGIGTDNNNSSDSVNMIGDMKFMAHIHRAVHRDADVLTPEKILEMATIDGARSLGMDHEIGSIETGKRADLILLDLRHPQTTPHHHLAATIVFQAYGNEVDTVLIDGNVVMENRRLSFLPPERELAFLEEAQSRATAILQRANMVANPAWRSL

SEQ ID NO: 577 - protein, 473 aa, Artificial Sequence
  Description of Artificial Sequence: Synthetic peptide
MQTLSIQHGTLVTMDQYRRVLGDSWVHVQDGRIVALGVHAESVPPPADRVIDARGKVVLPGFINAHTHVNQILLRGGPSHGRQLYDWLFNVVYPGQKAMRPEVAVAVRLYCAEAVRSGITTINEEADSAIYPGNIEAAMAVYGEVGVRVVYARMFFDRMDGRIQGYVDALKARSPQVELCSIMEETAVAKDRITALSDQYHGTAGGRISVWPAPATTTPVTVEGMRWAQAFARDRAVMWTLHMAESDHDERIIGGSPAEYMECYGLLDERLQVAHCVYFDRKDVRLLHRHNVKVASQVVSNAYLGSGVAPVPEMVERGMAVGIGTDNDNSCDSVNMIGDMKFMAHIHRAVHRDADVLTPEKILEMATIDGARSLGMDHEIGSIETGKRADLILLDLRHPQTTPHHHLAATIVFQAYGNEVDTVLIDGNVVMENRRLSFLPPERELAFLEEAQSRATAILQRANMVANPAWRSL

SEQ ID NO: 578 - protein, 473 aa, Artificial Sequence
  Description of Artificial Sequence: Synthetic peptide
MQTLSIQHGTLVTMDQYRRVLGDSWVHVQDGRIVALGVHAESVPPPADRVIDARGKVVLPGFINAHTHVNQILLRGGPSHGRQLYDWLFNVVYPGQKAMRPEVAVAVRLYCAEAVRSGITTINEEADSAIYPGNIEAAMAVYGEVGVRVVYARMFFDRMDGRIQGYVDALKARSPQVELCSIMEETAVAKDRITALSDQYHGTAGGRISVWPAPATTTPVTVEGMRWAQAFARDRAVMWTLHMAESDHDERIIGGSPAEYMECYGLLDERLQVAHCVYFDRKDVRLLHRHNVKVASQVVSNAYLGSGVAPVPEMVERGMAVGIGTDNDNSSDSVNMIGDMKFMAHIHRAVHRDADVLTPEKILEMATIDGARSLGMDHEIGSIETGKRADLILLDLRHPQTTPHHHLAATIVFQAYGNEVDTVLIDGNVVMENRRLSFLPPERELAFLEEAQSRATAILQRANMVANPAWRSL

SEQ ID NO: 579 - protein, 473 aa, Artificial Sequence
  Description of Artificial Sequence: Synthetic peptide
MQTLSIQHGTLVTMDQYRRVLGDSWVHVQDGRIVALGVHAESVPPPADRVIDARGKVVLPGFINAHTHVNQILLRGGPSHGRQLYDWLFNVVYPGQKAMRPEVAVAVRLYCAEAVRSGITTINEEADSAIYPGNIEAAMAVYGEVGVRVVYARMFFDRMDGRIQGYVDALKARSPQVELCSIMEETAVAKDRITALSDQYHGTAGGRISVWPAPATTTPVTVEGMRWAQAFARDRAVMWTLHMAESDHDERIIGGSPAEYMECYGLLDERLQVAHCVYFDRKDVRLLHRHNVKVASQVVSNAYLGSGVAPVPEMVERGMAVGIGTDNNNSCDSVNMIGDMKFMAHIHRAVHRDADVLTPEKILEMATIDGARSLGMDHEIGSIETGKRADLILLDLRHPQTTPHHHLAATIVFQAYGNEVDTVLIDGNVVMENRRLSFLPPERELAFLEEAQSRATAILQRANMVANPAWRSL

SEQ ID NO: 580 - protein, 473 aa, Artificial Sequence
  Description of Artificial Sequence: Synthetic peptide
MQTLSIQHGTLVTMDQYRRVLGDSWVHVQDGRIVALGVHAESVPPPADRVIDARGKVVLPGFINAHTHVNQILLRGGPSHGRQLYDWLFNVVYPGQKAMRPEVAVAVRLYCAEAVRSGITTINEEADSAIYPGNIEAAMAVYGEVGVRVVYARMFFDRMDGRIQGYVDALKARSPQVELCSIMEETAVAKDRITALSDQYHGTAGGRISVWPAPATTTPVTVEGMRWAQAFARDRAVMWTLHMAESDHDERIIGGSPAEYMECYGLLDERLQVAHCVYFDRKDVRLLHRHNVKVASQVVSNAYLGSGVAPVPEMVERGMAVGIGTDNNNSSDSVNMIGDMKFMAHIHRAVHRDADVLTPEKILEMATIDGARSLGMDHEIGSIETGKRADLILLDLRHPQTTPHHHLAATIVFQAYGNEVDTVLIDGNVVMENRRLSFLPPERELAFLEEAQSRATAILQRANMVANPAWRSL

SEQ ID NO: 581 - protein, 473 aa, Artificial Sequence
  Description of Artificial Sequence: Synthetic peptide
MQTLSIQHGTLVTMDQYRRVLGDSWVHVQDGRIVALGVHAESVPPPADRVIDARGKVVLPGFINAHTHVNQILLRGGPSHGRQLYDWLFNVVYPGQKAMRPEVAVAVRLYCAEAVRSGITTINEEADSAIYPGNIEAAMAVYGEVGVRVVYARMFFDRMDGRIQGYVDALKARSPQVELCSIMEETAVAKDRITALSDQYHGTAGGRISVWPAPATTTPVTVEGMRWAQAFARDRAVMWTLHMAESDHDERIIGWSPAEYMECYGLLDERLQVAHCVYFDRKDVRLLHRHNVKVASQVVSNAYLGSGVAPVPEMVERGMAVGIGTDNDNSCDSVNMIGDMKFMAHIHRAVHRDADVLTPEKILEMATIDGARSLGMDHEIGSIETGKRADLILLDLRHPQTTPHHHLAATIVFQAYGNEVDTVLIDGNVVMENRRLSFLPPERELAFLEEAQSRATAILQRANMVANPAWRSL

SEQ ID NO: 582 - protein, 473 aa, Artificial Sequence
  Description of Artificial Sequence: Synthetic peptide
MQTLSIQHGTLVTMDQYRRVLGDSWVHVQDGRIVALGVHAESVPPPADRVIDARGKVVLPGFINAHTHVNQILLRGGPSHGRQLYDWLFNVVYPGQKAMRPEVAVAVRLYCAEAVRSGITTINEEADSAIYPGNIEAAMAVYGEVGVRVVYARMFFDRMDGRIQGYVDALKARSPQVELCSIMEETAVAKDRITALSDQYHGTAGGRISVWPAPATTTPVTVEGMRWAQAFARDRAVMWTLHMAESDHDERIIGWSPAEYMECYGLLDERLQVAHCVYFDRKDVRLLHRHNVKVASQVVSNAYLGSGVAPVPEMVERGMAVGIGTDNDNSSDSVNMIGDMKFMAHIHRAVHRDADVLTPEKILEMATIDGARSLGMDHEIGSIETGKRADLILLDLRHPQTTPHHHLAATIVFQAYGNEVDTVLIDGNVVMENRRLSFLPPERELAFLEEAQSRATAILQRANMVANPAWRSL

SEQ ID NO: 583 - protein, 473 aa, Artificial Sequence
  Description of Artificial Sequence: Synthetic peptide
MQTLSIQHGTLVTMDQYRRVLGDSWVHVQDGRIVALGVHAESVPPPADRVIDARGKVVLPGFINAHTHVNQILLRGGPSHGRQLYDWLFNVVYPGQKAMRPEVAVAVRLYCAEAVRSGITTINEEADSAIYPGNIEAAMAVYGEVGVRVVYARMFFDRMDGRIQGYVDALKARSPQVELCSIMEETAVAKDRITALSDQYHGTAGGRISVWPAPATTTPVTVEGMRWAQAFARDRAVMWTLHMAESDHDERIIGWSPAEYMECYGLLDERLQVAHCVYFDRKDVRLLHRHNVKVASQVVSNAYLGSGVAPVPEMVERGMAVGIGTDNNNSCDSVNMIGDMKFMAHIHRAVHRDADVLTPEKILEMATIDGARSLGMDHEIGSIETGKRADLILLDLRHPQTTPHHHLAATIVFQAYGNEVDTVLIDGNVVMENRRLSFLPPERELAFLEEAQSRATAILQRANMVANPAWRSL

SEQ ID NO: 584 - protein, 473 aa, Artificial Sequence
  Description of Artificial Sequence: Synthetic peptide
MQTLSIQHGTLVTMDQYRRVLGDSWVHVQDGRIVALGVHAESVPPPADRVIDARGKVVLPGFINAHTHVNQILLRGGPSHGRQLYDWLFNVVYPGQKAMRPEVAVAVRLYCAEAVRSGITTINEEADSAIYPGNIEAAMAVYGEVGVRVVYARMFFDRMDGRIQGYVDALKARSPQVELCSIMEETAVAKDRITALSDQYHGTAGGRISVWPAPATTTPVTVEGMRWAQAFARDRAVMWTLHMAESDHDERIIGWSPAEYMECYGLLDERLQVAHCVYFDRKDVRLLHRHNVKVASQVVSNAYLGSGVAPVPEMVERGMAVGIGTDNNNSSDSVNMIGDMKFMAHIHRAVHRDADVLTPEKILEMATIDGARSLGMDHEIGSIETGKRADLILLDLRHPQTTPHHHLAATIVFQAYGNEVDTVLIDGNVVMENRRLSFLPPERELAFLEEAQSRATAILQRANMVANPAWRSL

SEQ ID NO: 585 - protein, 473 aa, Artificial Sequence
  Description of Artificial Sequence: Synthetic peptide
MQTLSIQHGTLVTMDQYRRVLGDSWVHVQDGRIVALGVHAESVPPPADRVIDARGKVVLPGFINAHTHVNQILLRGGPSHGRQLYDWLFNVVYPGQKAMRPEVAVAVRLYCAEAVRSGITTINEEADSAIYPGNIEAAMAVYGEVGVRVVYARMFFDRMDGRIQGYVDALKARSPQVELCSIMEETAVAKDRITALSDQYHGTAGGRISVWPAPATTTPVTVEGMRWAQAFARDRAVMWTLHMAESDHDERILGGSPAEYMECYGLLDERLQVAHCVYFDRKDVRLLHRHNVKVASQVVSNAYLGSGVAPVPEMVERGMAVGIGTDNDNSCDSVNMIGDMKFMAHIHRAVHRDADVLTPEKILEMATIDGARSLGMDHEIGSIETGKRADLILLDLRHPQTTPHHHLAATIVFQAYGNEVDTVLIDGNVVMENRRLSFLPPERELAFLEEAQSRATAILQRANMVANPAWRSL

SEQ ID NO: 586 - protein, 473 aa, Artificial Sequence
  Description of Artificial Sequence: Synthetic peptide
MQTLSIQHGTLVTMDQYRRVLGDSWVHVQDGRIVALGVHAESVPPPADRVIDARGKVVLPGFINAHTHVNQILLRGGPSHGRQLYDWLFNVVYPGQKAMRPEVAVAVRLYCAEAVRSGITTINEEADSAIYPGNIEAAMAVYGEVGVRVVYARMFFDRMDGRIQGYVDALKARSPQVELCSIMEETAVAKDRITALSDQYHGTAGGRISVWPAPATTTPVTVEGMRWAQAFARDRAVMWTLHMAESDHDERILGGSPAEYMECYGLLDERLQVAHCVYFDRKDVRLLHRHNVKVASQVVSNAYLGSGVAPVPEMVERGMAVGIGTDNDNSSDSVNMIGDMKFMAHIHRAVHRDADVLTPEKILEMATIDGARSLGMDHEIGSIETGKRADLILLDLRHPQTTPHHHLAATIVFQAYGNEVDTVLIDGNVVMENRRLSFLPPERELAFLEEAQSRATAILQRANMVANPAWRSL

SEQ ID NO: 587 - protein, 473 aa, Artificial Sequence
  Description of Artificial Sequence: Synthetic peptide
MQTLSIQHGTLVTMDQYRRVLGDSWVHVQDGRIVALGVHAESVPPPADRVIDARGKVVLPGFINAHTHVNQILLRGGPSHGRQLYDWLFNVVYPGQKAMRPEVAVAVRLYCAEAVRSGITTINEEADSAIYPGNIEAAMAVYGEVGVRVVYARMFFDRMDGRIQGYVDALKARSPQVELCSIMEETAVAKDRITALSDQYHGTAGGRISVWPAPATTTPVTVEGMRWAQAFARDRAVMWTLHMAESDHDERILGGSPAEYMECYGLLDERLQVAHCVYFDRKDVRLLHRHNVKVASQVVSNAYLGSGVAPVPEMVERGMAVGIGTDNNNSCDSVNMIGDMKFMAHIHRAVHRDADVLTPEKILEMATIDGARSLGMDHEIGSIETGKRADLILLDLRHPQTTPHHHLAATIVFQAYGNEVDTVLIDGNVVMENRRLSFLPPERELAFLEEAQSRATAILQRANMVANPAWRSL

SEQ ID NO: 588 - protein, 473 aa, Artificial Sequence
  Description of Artificial Sequence: Synthetic peptide
MQTLSIQHGTLVTMDQYRRVLGDSWVHVQDGRIVALGVHAESVPPPADRVIDARGKVVLPGFINAHTHVNQILLRGGPSHGRQLYDWLFNVVYPGQKAMRPEVAVAVRLYCAEAVRSGITTINEEADSAIYPGNIEAAMAVYGEVGVRVVYARMFFDRMDGRIQGYVDALKARSPQVELCSIMEETAVAKDRITALSDQYHGTAGGRISVWPAPATTTPVTVEGMRWAQAFARDRAVMWTLHMAESDHDERILGGSPAEYMECYGLLDERLQVAHCVYFDRKDVRLLHRHNVKVASQVVSNAYLGSGVAPVPEMVERGMAVGIGTDNNNSSDSVNMIGDMKFMAHIHRAVHRDADVLTPEKILEMATIDGARSLGMDHEIGSIETGKRADLILLDLRHPQTTPHHHLAATIVFQAYGNEVDTVLIDGNVVMENRRLSFLPPERELAFLEEAQSRATAILQRANMVANPAWRSL

SEQ ID NO: 589 - protein, 473 aa, Artificial Sequence
  Description of Artificial Sequence: Synthetic peptide
MQTLSIQHGTLVTMDQYRRVLGDSWVHVQDGRIVALGVHAESVPPPADRVIDARGKVVLPGFINAHTHVNQILLRGGPSHGRQLYDWLFNVVYPGQKAMRPEVAVAVRLYCAEAVRSGITTINEEADSAIYPGNIEAAMAVYGEVGVRVVYARMFFDRMDGRIQGYVDALKARSPQVELCSIMEETAVAKDRITALSDQYHGTAGGRISVWPAPATTTPVTVEGMRWAQAFARDRAVMWTLHMAESDHDERILGWSPAEYMECYGLLDERLQVAHCVYFDRKDVRLLHRHNVKVASQVVSNAYLGSGVAPVPEMVERGMAVGIGTDNDNSCDSVNMIGDMKFMAHIHRAVHRDADVLTPEKILEMATIDGARSLGMDHEIGSIETGKRADLILLDLRHPQTTPHHHLAATIVFQAYGNEVDTVLIDGNVVMENRRLSFLPPERELAFLEEAQSRATAILQRANMVANPAWRSL

SEQ ID NO: 590 - protein, 473 aa, Artificial Sequence
  Description of Artificial Sequence: Synthetic peptide
MQTLSIQHGTLVTMDQYRRVLGDSWVHVQDGRIVALGVHAESVPPPADRVIDARGKVVLPGFINAHTHVNQILLRGGPSHGRQLYDWLFNVVYPGQKAMRPEVAVAVRLYCAEAVRSGITTINEEADSAIYPGNIEAAMAVYGEVGVRVVYARMFFDRMDGRIQGYVDALKARSPQVELCSIMEETAVAKDRITALSDQYHGTAGGRISVWPAPATTTPVTVEGMRWAQAFARDRAVMWTLHMAESDHDERILGWSPAEYMECYGLLDERLQVAHCVYFDRKDVRLLHRHNVKVASQVVSNAYLGSGVAPVPEMVERGMAVGIGTDNDNSSDSVNMIGDMKFMAHIHRAVHRDADVLTPEKILEMATIDGARSLGMDHEIGSIETGKRADLILLDLRHPQTTPHHHLAATIVFQAYGNEVDTVLIDGNVVMENRRLSFLPPERELAFLEEAQSRATAILQRANMVANPAWRSL

SEQ ID NO: 591 - protein, 473 aa, Artificial Sequence
  Description of Artificial Sequence: Synthetic peptide
MQTLSIQHGTLVTMDQYRRVLGDSWVHVQDGRIVALGVHAESVPPPADRVIDARGKVVLPGFINAHTHVNQILLRGGPSHGRQLYDWLFNVVYPGQKAMRPEVAVAVRLYCAEAVRSGITTINEEADSAIYPGNIEAAMAVYGEVGVRVVYARMFFDRMDGRIQGYVDALKARSPQVELCSIMEETAVAKDRITALSDQYHGTAGGRISVWPAPATTTPVTVEGMRWAQAFARDRAVMWTLHMAESDHDERILGWSPAEYMECYGLLDERLQVAHCVYFDRKDVRLLHRHNVKVASQVVSNAYLGSGVAPVPEMVERGMAVGIGTDNNNSCDSVNMIGDMKFMAHIHRAVHRDADVLTPEKILEMATIDGARSLGMDHEIGSIETGKRADLILLDLRHPQTTPHHHLAATIVFQAYGNEVDTVLIDGNVVMENRRLSFLPPERELAFLEEAQSRATAILQRANMVANPAWRSL

SEQ ID NO: 592 - protein, 473 aa, Artificial Sequence
  Description of Artificial Sequence: Synthetic peptide
MQTLSIQHGTLVTMDQYRRVLGDSWVHVQDGRIVALGVHAESVPPPADRVIDARGKVVLPGFINAHTHVNQILLRGGPSHGRQLYDWLFNVVYPGQKAMRPEVAVAVRLYCAEAVRSGITTINEEADSAIYPGNIEAAMAVYGEVGVRVVYARMFFDRMDGRIQGYVDALKARSPQVELCSIMEETAVAKDRITALSDQYHGTAGGRISVWPAPATTTPVTVEGMRWAQAFARDRAVMWTLHMAESDHDERILGWSPAEYMECYGLLDERLQVAHCVYFDRKDVRLLHRHNVKVASQVVSNAYLGSGVAPVPEMVERGMAVGIGTDNNNSSDSVNMIGDMKFMAHIHRAVHRDADVLTPEKILEMATIDGARSLGMDHEIGSIETGKRADLILLDLRHPQTTPHHHLAATIVFQAYGNEVDTVLIDGNVVMENRRLSFLPPERELAFLEEAQSRATAILQRANMVANPAWRSL

SEQ ID NO: 593 - protein, 473 aa, Artificial Sequence
  Description of Artificial Sequence: Synthetic peptide
MQTLSIQHGTLVTMDQYRRVLGDSWVHVQDGRIVALGVHAESVPPPADRVIDARGKVVLPGFINAHTHVNQILLRGGPSHGRQLYDWLFNVVYPGQKAMRPEVAVAVRLYCAEAVRSGITTINEEADSAIYPGNIEAAMAVYGEVGVRVVYARMFFDRMDGRIQGYVDALKARSPQVELCSIMEETAVAKDRITALSDQYHGTAGGRISVWPAPATTTTVTVEGMRWAQAFARDRAVMWTLHMAESDHDERIIGGSPAEYMECYGLLDERLQVAHCVYFDRKDVRLLHRHNVKVASQVVSNAYLGSGVAPVPEMVERGMAVGIGTDNDNSCDSVNMIGDMKFMAHIHRAVHRDADVLTPEKILEMATIDGARSLGMDHEIGSIETGKRADLILLDLRHPQTTPHHHLAATIVFQAYGNEVDTVLIDGNVVMENRRLSFLPPERELAFLEEAQSRATAILQRANMVANPAWRSL

SEQ ID NO: 594 - protein, 473 aa, Artificial Sequence
  Description of Artificial Sequence: Synthetic peptide
MQTLSIQHGTLVTMDQYRRVLGDSWVHVQDGRIVALGVHAESVPPPADRVIDARGKVVLPGFINAHTHVNQILLRGGPSHGRQLYDWLFNVVYPGQKAMRPEVAVAVRLYCAEAVRSGITTINEEADSAIYPGNIEAAMAVYGEVGVRVVYARMFFDRMDGRIQGYVDALKARSPQVELCSIMEETAVAKDRITALSDQYHGTAGGRISVWPAPATTTTVTVEGMRWAQAFARDRAVMWTLHMAESDHDERIIGGSPAEYMECYGLLDERLQVAHCVYFDRKDVRLLHRHNVKVASQVVSNAYLGSGVAPVPEMVERGMAVGIGTDNDNSSDSVNMIGDMKFMAHIHRAVHRDADVLTPEKILEMATIDGARSLGMDHEIGSIETGKRADLILLDLRHPQTTPHHHLAATIVFQAYGNEVDTVLIDGNVVMENRRLSFLPPERELAFLEEAQSRATAILQRANMVANPAWRSL

SEQ ID NO: 595 - protein, 473 aa, Artificial Sequence
  Description of Artificial Sequence: Synthetic peptide
MQTLSIQHGTLVTMDQYRRVLGDSWVHVQDGRIVALGVHAESVPPPADRVIDARGKVVLPGFINAHTHVNQILLRGGPSHGRQLYDWLFNVVYPGQKAMRPEVAVAVRLYCAEAVRSGITTINEEADSAIYPGNIEAAMAVYGEVGVRVVYARMFFDRMDGRIQGYVDALKARSPQVELCSIMEETAVAKDRITALSDQYHGTAGGRISVWPAPATTTTVTVEGMRWAQAFARDRAVMWTLHMAESDHDERIIGGSPAEYMECYGLLDERLQVAHCVYFDRKDVRLLHRHNVKVASQVVSNAYLGSGVAPVPEMVERGMAVGIGTDNNNSCDSVNMIGDMKFMAHIHRAVHRDADVLTPEKILEMATIDGARSLGMDHEIGSIETGKRADLILLDLRHPQTTPHHHLAATIVFQAYGNEVDTVLIDGNVVMENRRLSFLPPERELAFLEEAQSRATAILQRANMVANPAWRSL

SEQ ID NO: 596 - protein, 473 aa, Artificial Sequence
  Description of Artificial Sequence: Synthetic peptide
MQTLSIQHGTLVTMDQYRRVLGDSWVHVQDGRIVALGVHAESVPPPADRVIDARGKVVLPGFINAHTHVNQILLRGGPSHGRQLYDWLFNVVYPGQKAMRPEVAVAVRLYCAEAVRSGITTINEEADSAIYPGNIEAAMAVYGEVGVRVVYARMFFDRMDGRIQGYVDALKARSPQVELCSIMEETAVAKDRITALSDQYHGTAGGRISVWPAPATTTTVTVEGMRWAQAFARDRAVMWTLHMAESDHDERIIGGSPAEYMECYGLLDERLQVAHCVYFDRKDVRLLHRHNVKVASQVVSNAYLGSGVAPVPEMVERGMAVGIGTDNNNSSDSVNMIGDMKFMAHIHRAVHRDADVLTPEKILEMATIDGARSLGMDHEIGSIETGKRADLILLDLRHPQTTPHHHLAATIVFQAYGNEVDTVLIDGNVVMENRRLSFLPPERELAFLEEAQSRATAILQRANMVANPAWRSL

SEQ ID NO: 597 - protein, 473 aa, Artificial Sequence
  Description of Artificial Sequence: Synthetic peptide
MQTLSIQHGTLVTMDQYRRVLGDSWVHVQDGRIVALGVHAESVPPPADRVIDARGKVVLPGFINAHTHVNQILLRGGPSHGRQLYDWLFNVVYPGQKAMRPEVAVAVRLYCAEAVRSGITTINEEADSAIYPGNIEAAMAVYGEVGVRVVYARMFFDRMDGRIQGYVDALKARSPQVELCSIMEETAVAKDRITALSDQYHGTAGGRISVWPAPATTTTVTVEGMRWAQAFARDRAVMWTLHMAESDHDERIIGWSPAEYMECYGLLDERLQVAHCVYFDRKDVRLLHRHNVKVASQVVSNAYLGSGVAPVPEMVERGMAVGIGTDNDNSCDSVNMIGDMKFMAHIHRAVHRDADVLTPEKILEMATIDGARSLGMDHEIGSIETGKRADLILLDLRHPQTTPHHHLAATIVFQAYGNEVDTVLIDGNVVMENRRLSFLPPERELAFLEEAQSRATAILQRANMVANPAWRSL

SEQ ID NO: 598 - protein, 473 aa, Artificial Sequence
  Description of Artificial Sequence: Synthetic peptide
MQTLSIQHGTLVTMDQYRRVLGDSWVHVQDGRIVALGVHAESVPPPADRVIDARGKVVLPGFINAHTHVNQILLRGGPSHGRQLYDWLFNVVYPGQKAMRPEVAVAVRLYCAEAVRSGITTINEEADSAIYPGNIEAAMAVYGEVGVRVVYARMFFDRMDGRIQGYVDALKARSPQVELCSIMEETAVAKDRITALSDQYHGTAGGRISVWPAPATTTTVTVEGMRWAQAFARDRAVMWTLHMAESDHDERIIGWSPAEYMECYGLLDERLQVAHCVYFDRKDVRLLHRHNVKVASQVVSNAYLGSGVAPVPEMVERGMAVGIGTDNDNSSDSVNMIGDMKFMAHIHRAVHRDADVLTPEKILEMATIDGARSLGMDHEIGSIETGKRADLILLDLRHPQTTPHHHLAATIVFQAYGNEVDTVLIDGNVVMENRRLSFLPPERELAFLEEAQSRATAILQRANMVANPAWRSL

SEQ ID NO: 599 - protein, 473 aa, Artificial Sequence
  Description of Artificial Sequence: Synthetic peptide
MQTLSIQHGTLVTMDQYRRVLGDSWVHVQDGRIVALGVHAESVPPPADRVIDARGKVVLPGFINAHTHVNQILLRGGPSHGRQLYDWLFNVVYPGQKAMRPEVAVAVRLYCAEAVRSGITTINEEADSAIYPGNIEAAMAVYGEVGVRVVYARMFFDRMDGRIQGYVDALKARSPQVELCSIMEETAVAKDRITALSDQYHGTAGGRISVWPAPATTTTVTVEGMRWAQAFARDRAVMWTLHMAESDHDERIIGWSPAEYMECYGLLDERLQVAHCVYFDRKDVRLLHRHNVKVASQVVSNAYLGSGVAPVPEMVERGMAVGIGTDNNNSCDSVNMIGDMKFMAHIHRAVHRDADVLTPEKILEMATIDGARSLGMDHEIGSIETGKRADLILLDLRHPQTTPHHHLAATIVFQAYGNEVDTVLIDGNVVMENRRLSFLPPERELAFLEEAQSRATAILQRANMVANPAWRSL

SEQ ID NO: 600 - protein, 473 aa, Artificial Sequence
  Description of Artificial Sequence: Synthetic peptide
MQTLSIQHGTLVTMDQYRRVLGDSWVHVQDGRIVALGVHAESVPPPADRVIDARGKVVLPGFINAHTHVNQILLRGGPSHGRQLYDWLFNVVYPGQKAMRPEVAVAVRLYCAEAVRSGITTINEEADSAIYPGNIEAAMAVYGEVGVRVVYARMFFDRMDGRIQGYVDALKARSPQVELCSIMEETAVAKDRITALSDQYHGTAGGRISVWPAPATTTTVTVEGMRWAQAFARDRAVMWTLHMAESDHDERIIGWSPAEYMECYGLLDERLQVAHCVYFDRKDVRLLHRHNVKVASQVVSNAYLGSGVAPVPEMVERGMAVGIGTDNNNSSDSVNMIGDMKFMAHIHRAVHRDADVLTPEKILEMATIDGARSLGMDHEIGSIETGKRADLILLDLRHPQTTPHHHLAATIVFQAYGNEVDTVLIDGNVVMENRRLSFLPPERELAFLEEAQSRATAILQRANMVANPAWRSL

SEQ ID NO: 601 - protein, 473 aa, Artificial Sequence
  Description of Artificial Sequence: Synthetic peptide
MQTLSIQHGTLVTMDQYRRVLGDSWVHVQDGRIVALGVHAESVPPPADRVIDARGKVVLPGFINAHTHVNQILLRGGPSHGRQLYDWLFNVVYPGQKAMRPEVAVAVRLYCAEAVRSGITTINEEADSAIYPGNIEAAMAVYGEVGVRVVYARMFFDRMDGRIQGYVDALKARSPQVELCSIMEETAVAKDRITALSDQYHGTAGGRISVWPAPATTTTVTVEGMRWAQAFARDRAVMWTLHMAESDHDERILGGSPAEYMECYGLLDERLQVAHCVYFDRKDVRLLHRHNVKVASQVVSNAYLGSGVAPVPEMVERGMAVGIGTDNDNSCDSVNMIGDMKFMAHIHRAVHRDADVLTPEKILEMATIDGARSLGMDHEIGSIETGKRADLILLDLRHPQTTPHHHLAATIVFQAYGNEVDTVLIDGNVVMENRRLSFLPPERELAFLEEAQSRATAILQRANMVANPAWRSL

SEQ ID NO: 602 - protein, 473 aa, Artificial Sequence
  Description of Artificial Sequence: Synthetic peptide
MQTLSIQHGTLVTMDQYRRVLGDSWVHVQDGRIVALGVHAESVPPPADRVIDARGKVVLPGFINAHTHVNQILLRGGPSHGRQLYDWLFNVVYPGQKAMRPEVAVAVRLYCAEAVRSGITTINEEADSAIYPGNIEAAMAVYGEVGVRVVYARMFFDRMDGRIQGYVDALKARSPQVELCSIMEETAVAKDRITALSDQYHGTAGGRISVWPAPATTTTVTVEGMRWAQAFARDRAVMWTLHMAESDHDERILGGSPAEYMECYGLLDERLQVAHCVYFDRKDVRLLHRHNVKVASQVVSNAYLGSGVAPVPEMVERGMAVGIGTDNDNSSDSVNMIGDMKFMAHIHRAVHRDADVLTPEKILEMATIDGARSLGMDHEIGSIETGKRADLILLDLRHPQTTPHHHLAATIVFQAYGNEVDTVLIDGNVVMENRRLSFLPPERELAFLEEAQSRATAILQRANMVANPAWRSL

SEQ ID NO: 603 - protein, 473 aa, Artificial Sequence
  Description of Artificial Sequence: Synthetic peptide
MQTLSIQHGTLVTMDQYRRVLGDSWVHVQDGRIVALGVHAESVPPPADRVIDARGKVVLPGFINAHTHVNQILLRGGPSHGRQLYDWLFNVVYPGQKAMRPEVAVAVRLYCAEAVRSGITTINEEADSAIYPGNIEAAMAVYGEVGVRVVYARMFFDRMDGRIQGYVDALKARSPQVELCSIMEETAVAKDRITALSDQYHGTAGGRISVWPAPATTTTVTVEGMRWAQAFARDRAVMWTLHMAESDHDERILGGSPAEYMECYGLLDERLQVAHCVYFDRKDVRLLHRHNVKVASQVVSNAYLGSGVAPVPEMVERGMAVGIGTDNNNSCDSVNMIGDMKFMAHIHRAVHRDADVLTPEKILEMATIDGARSLGMDHEIGSIETGKRADLILLDLRHPQTTPHHHLAATIVFQAYGNEVDTVLIDGNVVMENRRLSFLPPERELAFLEEAQSRATAILQRANMVANPAWRSL

SEQ ID NO: 604 - protein, 473 aa, Artificial Sequence
  Description of Artificial Sequence: Synthetic peptide
MQTLSIQHGTLVTMDQYRRVLGDSWVHVQDGRIVALGVHAESVPPPADRVIDARGKVVLPGFINAHTHVNQILLRGGPSHGRQLYDWLFNVVYPGQKAMRPEVAVAVRLYCAEAVRSGITTINEEADSAIYPGNIEAAMAVYGEVGVRVVYARMFFDRMDGRIQGYVDALKARSPQVELCSIMEETAVAKDRITALSDQYHGTAGGRISVWPAPATTTTVTVEGMRWAQAFARDRAVMWTLHMAESDHDERILGGSPAEYMECYGLLDERLQVAHCVYFDRKDVRLLHRHNVKVASQVVSNAYLGSGVAPVPEMVERGMAVGIGTDNNNSSDSVNMIGDMKFMAHIHRAVHRDADVLTPEKILEMATIDGARSLGMDHEIGSIETGKRADLILLDLRHPQTTPHHHLAATIVFQAYGNEVDTVLIDGNVVMENRRLSFLPPERELAFLEEAQSRATAILQRANMVANPAWRSL

SEQ ID NO: 605 - protein, 473 aa, Artificial Sequence
  Description of Artificial Sequence: Synthetic peptide
MQTLSIQHGTLVTMDQYRRVLGDSWVHVQDGRIVALGVHAESVPPPADRVIDARGKVVLPGFINAHTHVNQILLRGGPSHGRQLYDWLFNVVYPGQKAMRPEVAVAVRLYCAEAVRSGITTINEEADSAIYPGNIEAAMAVYGEVGVRVVYARMFFDRMDGRIQGYVDALKARSPQVELCSIMEETAVAKDRITALSDQYHGTAGGRISVWPAPATTTTVTVEGMRWAQAFARDRAVMWTLHMAESDHDERILGWSPAEYMECYGLLDERLQVAHCVYFDRKDVRLLHRHNVKVASQVVSNAYLGSGVAPVPEMVERGMAVGIGTDNDNSCDSVNMIGDMKFMAHIHRAVHRDADVLTPEKILEMATIDGARSLGMDHEIGSIETGKRADLILLDLRHPQTTPHHHLAATIVFQAYGNEVDTVLIDGNVVMENRRLSFLPPERELAFLEEAQSRATAILQRANMVANPAWRSL

SEQ ID NO: 606 - protein, 473 aa, Artificial Sequence
  Description of Artificial Sequence: Synthetic peptide
MQTLSIQHGTLVTMDQYRRVLGDSWVHVQDGRIVALGVHAESVPPPADRVIDARGKVVLPGFINAHTHVNQILLRGGPSHGRQLYDWLFNVVYPGQKAMRPEVAVAVRLYCAEAVRSGITTINEEADSAIYPGNIEAAMAVYGEVGVRVVYARMFFDRMDGRIQGYVDALKARSPQVELCSIMEETAVAKDRITALSDQYHGTAGGRISVWPAPATTTTVTVEGMRWAQAFARDRAVMWTLHMAESDHDERILGWSPAEYMECYGLLDERLQVAHCVYFDRKDVRLLHRHNVKVASQVVSNAYLGSGVAPVPEMVERGMAVGIGTDNDNSSDSVNMIGDMKFMAHIHRAVHRDADVLTPEKILEMATIDGARSLGMDHEIGSIETGKRADLILLDLRHPQTTPHHHLAATIVFQAYGNEVDTVLIDGNVVMENRRLSFLPPERELAFLEEAQSRATAILQRANMVANPAWRSL

SEQ ID NO: 607 - protein, 473 aa, Artificial Sequence
  Description of Artificial Sequence: Synthetic peptide
MQTLSIQHGTLVTMDQYRRVLGDSWVHVQDGRIVALGVHAESVPPPADRVIDARGKVVLPGFINAHTHVNQILLRGGPSHGRQLYDWLFNVVYPGQKAMRPEVAVAVRLYCAEAVRSGITTINEEADSAIYPGNIEAAMAVYGEVGVRVVYARMFFDRMDGRIQGYVDALKARSPQVELCSIMEETAVAKDRITALSDQYHGTAGGRISVWPAPATTTTVTVEGMRWAQAFARDRAVMWTLHMAESDHDERILGWSPAEYMECYGLLDERLQVAHCVYFDRKDVRLLHRHNVKVASQVVSNAYLGSGVAPVPEMVERGMAVGIGTDNNNSCDSVNMIGDMKFMAHIHRAVHRDADVLTPEKILEMATIDGARSLGMDHEIGSIETGKRADLILLDLRHPQTTPHHHLAATIVFQAYGNEVDTVLIDGNVVMENRRLSFLPPERELAFLEEAQSRATAILQRANMVANPAWRSL

SEQ ID NO: 608 - protein, 473 aa, Artificial Sequence
  Description of Artificial Sequence: Synthetic peptide
MQTLSIQHGTLVTMDQYRRVLGDSWVHVQDGRIVALGVHAESVPPPADRVIDARGKVVLPGFINAHTHVNQILLRGGPSHGRQLYDWLFNVVYPGQKAMRPEVAVAVRLYCAEAVRSGITTINEEADSAIYPGNIEAAMAVYGEVGVRVVYARMFFDRMDGRIQGYVDALKARSPQVELCSIMEETAVAKDRITALSDQYHGTAGGRISVWPAPATTTTVTVEGMRWAQAFARDRAVMWTLHMAESDHDERILGWSPAEYMECYGLLDERLQVAHCVYFDRKDVRLLHRHNVKVASQVVSNAYLGSGVAPVPEMVERGMAVGIGTDNNNSSDSVNMIGDMKFMAHIHRAVHRDADVLTPEKILEMATIDGARSLGMDHEIGSIETGKRADLILLDLRHPQTTPHHHLAATIVFQAYGNEVDTVLIDGNVVMENRRLSFLPPERELAFLEEAQSRATAILQRANMVANPAWRSL

SEQ ID NO: 609 - DNA, 15 bp, Artificial Sequence
  Description of Artificial Sequence: Synthetic oligonucleotide
atgcagaccttaagt

SEQ ID NO: 610 - protein, 12 aa, Artificial Sequence
  Description of Artificial Sequence: Synthetic peptide
NNILLKGGPAHG

SEQ ID NO: 611 - protein, 12 aa, Artificial Sequence
  Description of Artificial Sequence: Synthetic peptide
QQLIMRGGPTHG
